(19) United States
(12) Patent Application Publication
(10) Pub. No.: US 2009/0253634 A1
(43) Pub. Date: Oct. 8, 2009

(54) Methods and Compositions for the Treatment of Gastrointestinal Disorders

(75) Inventors: Mark G. Currie, Sterling, MA (US); Shalina Mahajan-Miklos, Stanford, CA (US); Angelika Fretzen, Somerville, MA (US); Li Jing Sun, New York, NY (US); Caroline Kurtz, Sudbury, MA (US); G. Todd Milne, Brookline, MA (US); Thea Norman, San Diego, CA (US); Shannon Roberts, Cambridge, MA (US); E. Kelly Sullivan, Arlington, MA (US)

Correspondence Address: FISH & RICHARDSON PC, P.O. BOX 1022, MINNEAPOLIS, MN, 55440-1022, US

(73) Assignee: MICROBIA, INC., Cambridge, MA (US)

(21) Appl. No.: 12/064,116

(22) PCT Filed: Aug. 21, 2006
(86) PCT No.: PCT/US06/32719

§ 371 Date: Apr. 23, 2009

Related U.S. Application Data
(60) Provisional application No. 60/709,971, filed on Aug. 19, 2005.
(60) Provisional application No. 60/720,294, filed on Sep. 22, 2005.
(60) Provisional application No. 60/763,198, filed on Jan. 27, 2006.

(51) Int. Cl. A61K 38/10; C07K 7/00

(52) U.S. Cl. 514/14; 530/327

(57) ABSTRACT

The present invention features compositions and related methods for treating IBS and other gastrointestinal disorders and conditions (e.g., gastrointestinal motility disorders, functional gastrointestinal disorders, gastnoesophageal reflux disease (GERD), duodenogastric reflux, Crohn's disease, ulcerative colitis, Inflammatory bowel disease, functional heartburn, dyspepsia (including functional dyspepsia or nonulcer dyspepsia), gastroparesis, chronic intestinal pseudo-obstruction (or colonic pseudo-obstruction), and disorders and conditions associated with constipation, e.g. constipation associated with use of opiate pain killers, post-surgical constipation (post-operative ileus), and constipation associated with neuropathic disorders as well as other conditions and disorders using peptides and other agents that activate the guanylate cyclase C (GC-C) receptor.

### TECHNICAL FIELD

[0001] This invention relates to methods and compositions for treating various disorders, including gastrointestinal disorders, obesity, congestive heart failure and benign prostatic hyperplasia.

### BACKGROUND

[0002] Irritable bowel syndrome (IBS) is a common chronic disorder of the intestine that affects 20 to 60 million individuals in the US alone (Lehman Brothers, Global Healthcare-Irritable bowel syndrome industry update, September 1999). IBS is the most common disorder diagnosed by gastroenterologists (28% of patients examined) and accounts for 12% of visits to primary care physicians (Camilleri 2001, Gastroenterology 120:652-668). In the US, the economic impact of IBS is estimated at $25 billion annually, through direct costs of health care use and indirect costs of absenteeism from work (Talley 1995, Gastroenterology 109:1736-1741). Patients with IBS have three times more absenteeism from work and report a reduced quality of life. Sufferers may be unable or unwilling to attend social events, maintain employment, or travel even short distances (Drossman 1993, Dig Dis Sci 38:1569-1580). There is a tremendous unmet medical need in this population since few prescription options exist to treat IBS.

[0003] Patients with IBS suffer from abdominal pain and a disturbed bowel pattern. Three subgroups of IBS patients have been defined based on the predominant bowel habit: constipation-predominant (c-IBS), diarrhea-predominant (d-IBS) or alternating between the two (a-IBS). Estimates of individuals who suffer from c-IBS range from 20-50% of the IBS patients with 30% frequently cited. In contrast to the other two subgroups that have a similar gender ratio, c-IDS is more common in women (ratio of 3:1) (Talley et al. 1995, Am J Epidemiol 142:76-83).

[0004] The definition and diagnostic criteria for IBS have been formalized in the “Rome Criteria” (Drossman et al. 1999, Gut 45:Suppl II: 1-81), which are well accepted in clinical practice. Briefly, the criteria specify that for at least 12 weeks (consecutive or non-consecutive in the preceding 12 months of abdominal discomfort or pain at least two of the following three features must occur: (1) relieved with defecation, (2) onset associated with a change in frequency of stool, and (3) onset associated with a change in form (appearance) of stool. The Rome II criteria also state that the symptoms that cumulatively support the diagnosis of irritable bowel syndrome include: abnormal stool frequency (“abnormal” may be defined as greater than 3 bowel movements per day and less than 3 bowel movements per week), abnormal stool form (lumpy/hard or loose/watery stool), abnormal stool passage (straining, urgency, or feeling of incomplete evacuation), passage of mucus, and bloating or feeling of abdominal distension. However, the complexity of symptoms has not been explained by anatomical abnormalities or metabolic changes. This has led to the classification of IBS as a functional GI disorder, which is diagnosed on the basis of the Rome criteria and limited evaluation to exclude organic disease (Ringel et al. 2001, Annu Rev Med 52: 319-338). IBS is considered to be a “biopsychosocial” disorder resulting from a combination of three interacting mechanisms: altered bowel motility, an increased sensitivity of the intestine or colon to pain stimuli (visceral sensitivity) and psychosocial factors (Camilleri 2001, Gastroenterology 120:652-668). Recently, there has been increasing evidence for a role of inflammation in etiology of IBS. Reports indicate that subsets of IBS patients have small but significant increases in colonic inflammatory and mast cells, increased inducible nitric oxide (NO) and synthase (iNOS) and altered expression of inflammatory cytokines (reviewed by Talley 2000, Medscape Coverage of DDW week).

[0005] The present invention features peptides that activate and/or bind the guanylate cyclase-C (GC-C) receptor (reviewed by Lucas et al. 2000 Pharmacol. Rev 52:375-414 and Vaandrager et al. 2002 Molecular and Cellular Biochemistry 230:73-83) and any of its variants, including but not limited to insertion, deletion, mutation, and splice variants. GC-C is a key regulator in mammals of intestinal function (although low levels of GC-C have been detected in other tissues). GC-C responds to the endogenous hormones, guanylin and uroguanylin, and to enteric bacterial peptides from the heat stable enterotoxin family (ST peptides). When agonists bind to GC-C, there is an elevation of the second messenger, cyclic GMP, and an increase in chloride and bicarbonate secretion, resulting in an increase in intestinal fluid secretion The Genbank GI accession number for guanylyl cyclase C homologs from multiple organisms are:

| Genbank | |
|---|---|
| GI number | organism |
| 27806993 | cattle |
| 16555439 | eel |
| 16555437 | eel |
| 4521169 | fish |
| 1850774 | frog |
| 1495352 | Guinea pig |
| 2494861 | Guinea pig |
| 4826752 | human |
| 4505441 | human |
| 1184046 | human |
| 1230617 | mouse |
| 2708786 | mouse |
| 71894985 | mouse |
| 47523018 | pig |
| 5930067 | rabbit |
| 6981000 | rat |
| 40445437 | worm |

### SUMMARY

[0006] The present invention features compositions and related methods for treating IBS and other gastrointestinal disorders and conditions (e.g., gastrointestinal motility disorders, chronic intestinal pseudo-obstruction, colonic pseudo-obstruction, Crohn's disease, duodenogastric reflux, dyspepsia, functional dyspepsia, nonulcer dyspepsia, a functional gastrointestinal disorder, functional heartburn, gastroesophageal reflux disease (GERD), gastroparesis, irritable bowel syndrome (IBS, e.g., constipation predominant-IBS, diarrhea predominat-IBS, and/or alternating-IBS)), post-operative ileus, ulcerative colitis, chronic constipation, and disorders and conditions associated with constipation (e.g. constipation associated with use of opiate pain killers, post-surgical constipation, and constipation associated with neuropathic disorders as well as other conditions and disorders are described herein The compositions feature peptides that activate the guanylate cyclase C (GC-C) receptor.

[0007] Also described herein are compositions and related methods for treating obesity, congestive heart failure (including congestive heart failure at any of stages I-IV according to New York Heart Association (NYHA) Functional Classification) and benign prostatic hyperplasia (BPH).

[0008] Without being bound by any particular theory, in the case of IBS and other gastrointestinal disorders the peptides are useful because they may increase gastrointestinal motility.

[0009] Without being bound by any particular theory, in the case of IBS and other gastrointestinal disorders the peptides are useful, in part, because they may decrease inflammation.

[0010] Without being bound by any particular theory, in the case of IBS and other gastrointestinal disorders the peptides are also useful because they may decrease gastrointestinal pain, visceral pain, chronic visceral hypersensitivity, or hypersensitivity to colorectal distension.

[0011] Without being bound by any particular theory, in the case of salt retention, fluid retention disorders and combinations thereof the peptides are also useful because they may elicit one or more of diuresis, naturesis and/or kaliuresis. Thus the peptides described herein may be diuretics.

[0012] The invention features pharmaceutical compositions comprising certain peptides that are capable of activating the guanylate-cyclase C (GC-C) receptor. Also within the invention are pharmaceutical compositions comprising a peptide or GC-C agonist described herein and one or more additional therapeutic agents including, without limitation, the agents described herein. The other agents can be administered with the peptides described herein (simultaneously or sequentially). They can also be linked to a peptide described herein to create therapeutic conjugates.

[0013] The invention includes methods for treating various gastrointestinal disorders by administering a peptide that acts as a partial or complete agonist of the GC-C receptor. The peptide includes at least six cysteines that can form three disulfide bonds. In certain embodiments the disulfide bonds are replaced by other covalent cross-links and in some cases the cysteines are substituted by other residues to provide for alternative covalent cross-links. The peptides may also include at least one trypsin or chymotrypsin cleavage site and/or an amino or carboxy-terminal analgesic peptide or small molecule, e.g., AspPhe or some other analgesic peptide. When present within the peptide, the analgesic peptide or small molecule may be preceded by a chymotrypsin or trypsin cleavage site that allows release of the analgesic peptide or small molecule. The peptides and methods described herein are also useful for treating pain and inflammation associated with various disorders, including gastrointestinal disorders. Certain peptides include a functional chymotrypsin or trypsin cleavage site located so as to allow inactivation of the peptide upon cleavage. Certain peptides having a functional cleavage site undergo cleavage and gradual inactivation in the digestive tract, and this is desirable in some circumstances. In certain peptides, a functional chymotrypsin site is altered, increasing the stability of the peptide in vivo.

[0014] The invention includes: a method for increasing intestinal motility comprising administering a GC-C receptor agonist, e.g., a peptide described herein, to a patient in need thereof.

[0015] The invention includes a method treating a disorder associated with reduced gastrointestinal transit rates or reduced gastrointestinal motility comprising administering a GC-C receptor agonist, e.g., a peptide described herein, to a patient in need thereof.

[0016] The invention also includes a method treating a gastrointestinal hypomotility disorder comprising administering a GC-C receptor agonist, e.g., a peptide described herein, to a patient in need thereof.

[0017] The disorders which can be treated by administering a GC-C receptor agonist inlcude constipation, constipation dominant irritable bowel syndrome and pelvic floor dyssynergia.

[0018] The invention features a method treating a non-inflammatory gastrointestinal disorder comprising administering a GC-C receptor agonist, e.g., a peptide described herein, to a patient in need thereof.

[0019] The invention includes a method treating a gastrointestinal disorder other than Crohn's disease and ulcerative colitis comprising administering a GC-C receptor agonist to a patient in need thereof.

[0020] The invention includes methods for treating other disorders such as congestive heart failure and benign prostatic hyperplasia by administering a peptide or small molecule (parenterally or orally) that acts as an agonist of the GC-C receptor. Such agents can be used in combination with natriuretic peptides (e.g., atrial natriuretic peptide, brain natriuretic peptide or C-type natriuretic peptide), a diuretic, or an inhibitor of angiotensin converting enzyme.

[0021] The invention features methods and compositions for increasing intestinal motility. Intestinal motility involves spontaneous coordinated dissentions and contractions of the stomach, intestines, colon and rectum to move food through the gastrointestinal tract during the digestive process.

[0022] In certain embodiments the patient has been diagnosed as suffering from IBS according to the Rome criteria. In certain embodiments the patient is female.

[0023] In certain embodiments the peptides include either one or two or more contiguous negatively charged amino acids (e.g., Asp or Glu) or one or two or more contiguous positively charged residues (e.g., Lys or Arg) or one or two or more contiguous positively or negatively charged amino acids at the carboxy terminus. In these embodiments all of the flanking amino acids at the carboxy terminus are either positively or negatively charged. In other embodiments the carboxy terminal charged amino acids are preceded by a Leu. For example, any of the following amino acid sequences can be added to the carboxy terminus of the peptide: Asp; Asp Lys; Lys Lys Lys Lys Lys Lys; Asp Lys Lys Lys Lys Lys Lys; Leu Lys Lys; and Leu Asp. It is also possible to simply add Leu at the carboxy terminus.

[0024] In a first aspect, the invention features a peptide comprising, consisting of, or consisting essentially of the amino acid sequence (I):

(SEQ ID NO: 1)

Xaa₁ Xaa₂ Xaa₃ Xaa₄ Xaa₅ Cys₆ Cys₇ Xaa₈ Xaa₉ Cys₁₀
Cys₁₁ Xaa₁₂ Xaa₁₃ Xaa₁₄ Cys₁₅ Xaa₁₆ Xaa₁₇ Cys₁₈
Xaa₁₉ Xaa₂₀ Xaa₂₁

[0025] In some embodiments Xaa₁ Xaa₂ Xaa₃ Xaa₄ Xaa₅ is Asn Ser Ser Asn Tyr or is missing or Xaa₁ Xaa₂ Xaa₃ Xaa₄ is missing.

[0026] In certain embodiments Xaa₈, Xaa₉, Xaa₁₂, Xaa₁₄, Xaa₁₆, Xaa₁₇, and Xaa₁₉ can be any amino acid. In certain embodiments Xaa₈, Xaa₉, Xaa₁₂, Xaa₁₄, Xaa₁₆, Xaa₁₇, and Xaa₁₉ can be any natural or non-natural amino acid or amino acid analog.

[0027] In certain embodiments, the peptide does not include the sequence of E. coli ST peptide. In other embodiment, the peptide does not include the sequence of any of the peptides in Table 1, below.

[0028] In certain embodiments Xaas is Asn, Trp, Tyr, Asp, or Phe. In other embodiments, Xaas can also be Thr or Ile. In other embodiments Xaa₅ is Tyr, Asp or Trp. In certain embodiments Xaas is Asn, Trp, Tyr, Asp, Ile, Thr or Phe. In certain embodiments Xaa₅ is Asn.

[0029] In some embodiments Xaa₈ is Glu, Asp, Gln, Gly or Pro. In other embodiments Xaa₈ is Glu. In other embodiments Xaa₈ is Glu or Asp. In others it is Asn, Glu, or Asp. In others it is Glu, His, Lys, Gln, Asn, or Asp. In others it is Glu, His, Gln, Asn, or Asp. In others it is Glu, Asn, His, Gln, Lys, Asp or Ser. In still others it is Pro. In certain embodiments it is any natural or non-natural amino acid or amino acid analog.

[0030] In some embodiments Xaa₉ is Leu, Ile, Val, Ala, Lys, Arg, Trp, Tyr or Phe. In some embodiments Xaa₉ is Leu, Ile, Val, Lys, Arg, Trp, Tyr or Phe. In others it is Leu, Ile, Val, Trp, Tyr or Phe. In others it is Leu, Ile or Val. In others it is Trp, Tyr or Phe. In others it is Leu, Ile, Lys, Arg, Trp, Tyr, or Phe. In others it is Leu, Val, Ile, or Met. In others it is Leu or Phe. In others it is Leu, Phe, or Tyr. In others it is Tyr, Phe or His. In others it is Phe, His, Trp, or Tyr. In certain embodiments, Xaa₉ is not Leu. In others it is Tyr. In other embodiments it is any natural or non-natural aromatic amino acid or amino acid analog. In certain embodiments it is any natural or non-natural amino acid or amino acid analog.

[0031] In certain embodiments, Xaa₁₂ is Asn, Tyr, Asp or Ala. In others it is Asn. In others it is Asn, Met, Arg, Lys, His, or Gln. In others it is Asn, Lys, His, or Gln. In others it is Asn, Asp, Glu or Gln. In others it is Asn, Thr, Ser, Arg, Lys, Gln, or His. In others it is Asn, Ser, or His. In certain embodiments it is any natural or non-natural amino acid or amino acid analog.

[0032] In certain embodiments, Xaa₁₃ is Ala, Pro or Gly. In others it is Pro or Gly. In others it is Pro and in still others it is Gly.

[0033] In certain embodiments, Xaa₁₄ is Ala, Leu, Ser, Gly, Val, Glu, Gln, Ile, Leu, Thr, Lys, Arg, or Asp. In others it is Ala or Gly. In others it is Val or Ala. In others it is Ala or Thr. In others it is Ala. In others it is Val, Gln, Asn, Glu, Asp, Thr, or Ala. In others it is Gly, Cys or Ser. In still others it is Thr. In certain embodiments it is any natural or non-natural amino acid or amino acid analog.

[0034] In certain embodiments Xaa₁₆ is Thr, Ala, Asn, Lys, Arg, Trp, Gly or Val. In others it is Thr, Ala, Asn, Lys, Arg or Tip. In others it is Thr, Ala, Lys, Arg or Trp. In certain embodiments it is Thr, Ala or Trp. In others it is Thr. In certain embodiments it is Trp, Tyr or Phe. In certain embodiments it is Thr or Ala. In certain embodiments it is Val. In certain embodiments it is Gly. In others it is Thr, Ser, Met or Val. In others it is Val, Ala, or Thr. In others it is Ile, Val, Lys, Asn, Glu, Asp, or Thr. In certain embodiments it is any natural or non-natural amino acid or amino acid analog. In certain embodiments it is any natural or non-natural non-aromatic amino acid or amino acid analog.

[0035] In certain embodiments Xaa₁₇ is Gly, Pro or Ala. In certain embodiments it is Gly. In certain embodiments it is Ala. In others it is Gly or Ala. In others it is Gly, Asn, Ser or Ala. In others it is Asn, Glu, Asp, Thr, Ala, Ser, or Gly. In others it is Asp, Ala, Ser, or Gly. In certain embodiments it is any natural or non-natural amino acid or amino acid analog.

[0036] In certain embodiments Xaa₁₉ is Trp, Tyr, Phe, Asn, Ile, Val, His, Leu, or Arg. In certain embodiments it is Trp, Tyr, Asn or Leu. In certain embodiments it is Trp, Tyr or Phe. In others it is Tyr, Phe or His. In others it is Tyr or Trp. In others it is Tyr. In certain embodiments it is Leu, Ile or Val. In certain embodiments it is His. In certain embodiments it is Trp, Tyr, Phe, Asn, Ile, Val, His or Leu. In certain embodiments it is Trp, Tyr, Phe or Leu. In certain embodiments it is Tyr or Leu. In certain embodiments it is Lys or Arg. In certain embodiments it is any amino acid other than Pro, Arg, Lys, Asp or Glu. In certain embodiments it is any amino acid other than Pro. In certain embodiments it is any natural or non-natural amino acid or amino acid analog. In certain embodiments it is missing.

[0037] In certain embodiments Xaa₂₀ is Asp or Asn. In certain embodiments Xaa₂₀ Xaa₂₁ is AspPhe or is missing or Xaa₂₀ is Asn or Glu and Xaa₂₁ is missing or Xaa₁₉ Xaa₂₀ Xaa₂₁ is missing.

[0038] In certain embodiments, the invention features, a purified polypeptide comprising the amino acid sequence (II):

Xaa₁ Xaa₂ Xaa₃ Xaa₄ Xaa₅ Cys₆ Cys₇ Xaa₈ Xaa₉ Cys₁₀
Cys₁₁ Asn₁₂ Pro₁₃ Ala₁₄ Cys₁₅ Xaa₁₆ Gly₁₇ Cys₁₈
Xaa₁₉ Xaa₂₀ Xaa₂₁

wherein Xaa₁ Xaa₂ Xaa₃ Xaa₄ Xaa₅ is Asn Ser Ser Asn Tyr or is missing or Xaa₁ Xaa₂ Xaa₃ Xaa₄ is missing and Xaa₅ is Asn;

[0039] Xaa₈ is Glu or Asp;

[0040] Xaa₉ is Leu, Ile, Val, Trp, Tyr or Phe;

[0041] Xaa₁₆ is Thr, Ala, Trp;

[0042] Xaa₁₉ is Trp, Tyr, Phe or Leu or is missing; and Xaa₂₀Xaa₂₁ is AspPhe.

[0043] In various embodiments the invention features a purified polypeptide comprising the amino acid sequence (II): Xaa₁ Xaa₂ Xaa₃ Xaa₄ Xaa₅ Cys₆ Cys₇ Xaa₈ Xaa₉ Cys₁₀ Cys₁₁ Asn₁₂ Pro₁₃ Ala₁₄ Cys₁₅ Xaa₁₆ Gly₁₇ Cys₁₈ Xaa₁₉ Xaa₂₀Xaa₂₁ wherein, Xaa₉ is Leu, Ile or Val and Xaa₁₆ is Tip, Tyr or Phe; Xaa₉ is Trp, Tyr or Phe, and Xaa₁₆ is Thr or Ala; Xaa₁₉ is Trp, Tyr, Phe and Xaa₂₀ Xaa₂₁ is AspPhe; and Xaa₁ Xaa₂ Xaa₃ Xaa₄ is missing and Xaa₅ is Asn; the peptide comprises fewer than 50, 40, 30 or 25 amino acids; or fewer than five amino acids precede Cys₆.

[0044] In certain embodiments the peptide includes a peptide comprising, consisting essentially, or consisting of the amino acid sequence Xaa₁ Xaa₂ Xaa₃ Xaa₄ Xaa₅ Cys Cys Glu Xaa₉ Cys Cys Asn Pro Ala Cys Thr Gly Cys Tyr Xaa₂₀ Xaa₂₁ (II) (SEQ ID NO:2) wherein Xaa₉ is any amino acid: wherein Xaa₉ is any amino acid other than Leu; wherein Xaa₉ is selected from Phe, Trp and Tyr; wherein Xaa₉ is selected from any other natural or non-natural aromatic amino acid; wherein Xaa₉ is Tyr; wherein Xaa₉ is Phe; wherein Xaa₉ is Trp; wherein Xaa₁ Xaa₂ Xaa₃ Xaa₄ Xaa₅ is Asn Ser Ser Asn Tyr; wherein Xaa₁, Xaa₂, Xaa₃, Xaa₄, and Xaa₅ are missing; wherein Xaa₁, Xaa₂, Xaa₃ and Xaa₄ are missing; wherein Xaa₁, Xaa₂ and Xaa₃ are missing; wherein Xaa₁ and Xaa₂ are missing; wherein Xaa₁ is missing; wherein Xaa₂₀ Xaa₂₁ is AspPhe or is missing or Xaa₂₀ is Asn or Glu and Xaa₂₁ is missing or Xaa₁₉ Xaa₂₀ Xaa₂₁ is missing; wherein Xaa₁ Xaa₂ Xaa₃ Xaa₄ Xaa₅ and Tyr Xaa₂₀ Xaa₂₁ are missing. In the case of a peptide comprising the sequence (I): Xaa₁ Xaa₂ Xaa₃ Xaa₄ Xaa₅ Cys₆ Cys₇ Xaa₈ Xaa₉ Cys₁₀ Cys₁₁ Xaa₁₂ Xaa₁₃ Xaa₁₄ Cys₁₅ Xaa₁₆ Xaa₁₇ Cys₁₈ Xaa₁₉ Xaa₂₀Xaa₂₁ wherein: Xaa₁ Xaa₂ Xaa₃ Xaa₄ Xaa₅ is missing and/or the sequence Xaa₁₉ Xaa₂₀ Xaa₂₁ is missing, the peptide can still contain additional carboxyterminal or amino terminal amino acids or both. In the case of peptides missing one or more terminal amino acids such as Xaa₁ or Xaa₂₁, the peptide can still contain additional carboxyterminal or amino terminal amino acids or both.

[0045] In certain embodiments, the peptide includes disulfide bonds between Cys₆ and Cys₁₁, between Cys₇ and Cys₁₅ and between Cys₁₀ and Cys₁₈. In other embodiments, the peptide is a reduced peptide having no disulfide bonds. In still other embodiments the peptide has one or two disulfide bonds chosen from: a disulfide bond between Cys₆ and Cys₁₁, a disulfide bond between Cys₇ and Cys₁₅ and a disulfide bond between Cys₁₀ and Cys₁₈.

[0046] In certain embodiments the peptide includes a peptide comprising, consisting essentially, or consisting of the amino acid sequence Cys Cys Glu Xaa₄ Cys Cys Asn Pro Ala Cys Thr Gly Cys Xaa₁₄ (SEQ ID NO:XXX) wherein Xaa₄ is any amino acid: wherein Xaa₄ is any amino acid other than Leu; wherein Xaa₄ is selected from Phe, Trp and Tyr; wherein Xaa₄ is selected from any other natural aromatic amino acid or non-natural aromatic amino acid; wherein Xaa₄ is Tyr; wherein Xaa₄ is Phe; wherein Xaa₄ is Trp; wherein Xaa₁₄ is Tyr, wherein Xaa₁₄ is missing, and wherein Xaa₁₄ is selected from any other natural or non-natural amino acid. In certain embodiments, the peptide may contain additional carboxyterminal or amino terminal amino acids or both. In some embodiments the peptide is 13, 14, 15, or 16 amino acids long.

[0047] In certain embodiments, the peptide includes disulfide bonds between Cys₁ and Cys₆, between Cys₂ and Cys₁₀ and between Cys₅ and Cys₁₃. In other embodiments, the peptide is a reduced peptide having no disulfide bonds. In still other embodiments the peptide has one or two disulfide bonds chosen from: a disulfide bond between Cys₁ and Cys₆, a disulfide bond between Cys₂ and Cys₁₀ and a disulfide bond between Cys₅ and Cys₁₃.

[0048] In certain embodiments, one or more amino acids can be replaced by a non-naturally occurring amino acid or a naturally or non-naturally occurring amino acid analog. In certain embodiments, one or more L-amino acids can be substituted with a D-amino acid. There are many amino acids beyond the standard 20 amino acids (Ala, Arg, Asn, Asp, Cys, Gln, Glu, Gly, His, Ile, Leu, Lys, Met, Phe, Pro, Ser, Thr, Trp, Tyr, and Val). Some are naturally-occurring others are not (see, for example, Hunt, The Non-Protein Amino Acids: In Chemistry and Biochemistry of the Amino Acids, Barrett, Chapman and Hall, 1985). For example, an aromatic amino acid can be replaced by 3,4-dihydroxy-L-phenylalanine, 3-iodo-L-tyrosine, triiodothyronine, L-thyroxine, phenylglycine (Phg) or nor-tyrosine (norTyr). Phg and norTyr and other amino acids including Phe and Tyr can be substituted by, e.g., a halogen, —CH3, —OH, —CH₂NH₃, —C(O)H, —CH₂CH₃, —CN, —CH₂CH₂CH₃, —SH, or another group. Any amino acid can be substituted by the D-form of the amino acid.

With regard to non-naturally occurring amino acids or naturally and non-naturally occurring amino acid analogs, a number of substitutions in the peptide of formula I or the peptide of formula II are possible alone or in combination.
Xaa₈ can be replaced by gamma-Hydroxy-Glu or gamma-Carboxy-Glu.
Xaa₉ can be replaced by an alpha substituted amino acid such as L-alpha-methylphenylalanine or by analogues such as: 3-Amino-Tyr; Tyr(CH₃); Tyr(PO₃(CH₃)₂); Tyr(SO₃H); beta-Cyclohexyl-Ala; beta-(1-Cyclopentenyl)-Ala; beta-Cyclopentyl-Ala; beta-Cyclopropyl-Ala; beta-Quinolyl-Ala; beta-(2-Thiazolyl)-Ala; beta-(Triazole-1-yl)-Ala; beta-(2-Pyridyl)-Ala; beta-(3-Pyridyl)-Ala; Amino-Phe; Fluoro-Phe; Cyclohexyl-Gly; tBu-Gly; beta-(3-benzothienyl)-Ala; beta-(2-thienyl)-Ala; 5-Methyl-Trp; and 4-Methyl-Trp.
Xaa₁₃ can be an N(alpha)-C(alpha) cyclized amino acid analogues with the structure:

[chemical structure]

Xaa₁₃ can also be homopro (L-pipecolic acid); hydroxy-Pro; 3,4-Dehydro-Pro; 4-fluoro-Pro; or alpha-methyl-Pro.

### When Xaa₁₃ is Gly, Ala, Leu or Val, Xaa₁₄ can be:

[chemical structure]

Xaa₁₄ can also be an alpha-substitued or N-methylated amino acid such as alpha-amino isobutyric acid (aib), L/D-alpha-ethylalanine (L/D-isovaline), L/D-methylvaline, or L/D-alpha-methylleucine or a non-natural amino acid such as beta-fluoro-Ala.

[0050] Xaa₁₇ can be alpha-amino isobutyric acid (aib) or L/D-alpha-ethylalanine (UD-isovaline).

[0051] Further examples of unnatural amino acids include: an unnatural analogue of tyrosine; an unnatural analogue of glutamine; an unnatural analogue of phenylalanine; an unnatural analogue of serine; an unnatural analogue of threonine; an alkyl, aryl, acyl, azido, cyano, halo, hydrazine, hydrazide, hydroxyl, alkenyl, alkynl, ether, thiol, sulfonyl, seleno, ester, thioacid, borate, boronate, phospho, phosphono, phosphine, heterocyclic, enone, imine, aldehyde, hydroxylamine, keto, or amino substituted amino acid, or any combination thereof; an amino acid with a photoactivatable cross-linker; a spin-labeled amino acid; a fluorescent amino acid; an amino acid with a novel functional group; an amino acid that covalently or noncovalently interacts with another molecule; a metal binding amino acid; an amino acid that is amidated at a site that is not naturally amidated, a metal-containing amino acid; a radioactive amino acid; a photocaged and/or photoisomerizable amino acid; a biotin or biotin-analogue containing amino acid; a glycosylated or carbohydrate modified amino acid; a keto containing amino acid; amino acids comprising polyethylene glycol or polyether; a heavy atom substituted amino acid (e.g., an amino acid containing deuterium, tritium, ¹³C, ¹⁵N, or ¹⁸O); a chemically cleavable or photocleavable amino acid; an amino acid with an elongated side chain; an amino acid containing a toxic group; a sugar substituted amino acid, e.g., a sugar substituted serine or the like; a carbon-linked sugar-containing amino acid; a redox-active amino acid; an α-hydroxy containing acid; an amino thio acid containing amino acid; an α, α disubstituted amino acid; a β-amino acid; a cyclic amino acid other than proline; an O-methyl-L-tyrosine; an L-3-(2-naphthyl)alanine; a 3-methyl-phenylalanine; a p-acetyl-L-phenylalanine; an 0-4-allyl-L-tyrosine; a 4-propyl-L-tyrosine; a tri-O-acetyl-GlcNAcβ-serine; an L-Dopa; a fluorinated phenylalanine; an isopropyl-L-phenylalanine; a p-azido-L-phenylalanine; a p-acyl-L-phenylalanine; a p-benzoyl-L-phenylalanine; an L-phosphoserine; a phosphonoserine; a phosphonotyrosine; a p-iodo-phenylalanine; a 4-fluorophenylglycine; a p-bromophenylalanine; a p-amino-L-phenylalanine; an isopropyl-L-phenylalanine; L-3-(2-naphthyl)alanine; an amino-, isopropyl-, or O-allyl-containing phenylalanine analogue; a dopa, O-methyl-L-tyrosine; a glycosylated amino acid; a p-(propargyloxy)phenylalanine; dimethyl-Lysine; hydroxy-proline; mercaptopropionic acid; methyl-lysine; 3-nitro-tyrosine; norleucine; pyro-glutamic acid; Z (Carbobenzoxyl); ε-Acetyl-Lysine; β-alanine; aminobenzoyl derivative; aminobutyric acid (Abu); citrulline; aminohexanoic acid; aminoisobutyric acid; cyclohexylalanine; d-cyclohexylalanine; hydroxyproline; nitro-arginine; nitro-phenylalanine; nitro-tyrosine; norvaline; octahydroindole carboxylate; ornithine; penicillamine; tetrahydroisoquinoline; acetamidomethyl protected amino acids and pegylated amino acids. Further examples of unnatural amino acids and amino acid analogs can be found in U.S. 20030108885, U.S. 20030082575, US20060019347 (paragraphs 410-418) and the references cited therein. The polypeptides described herein can include further modifications including those described in US20060019347, paragraph 589.

[0052] In some embodiments, an amino acid can be replaced by a naturally-occurring, non-essential amino acid, e.g., taurine.

[0053] Methods to manfacture peptides containing unnatural amino acids can be found in, for example, U.S. 20030108885, U.S. 20030082575, US20060019347, Deiters et al., J Am Chem. Soc. (2003) 125:11782-3, Chin et al., Science (2003) 301:964-7, and the references cited therein.

[0054] Peptides that include non-natural amino acids can also be prepared using the methods described in WO02086075

[0055] The peptides described herein can have one or more conventional peptide bonds replaced by an alternative bond. Such replacements can increase the stability of the peptide. For example, replacement of the peptide bond between Cys₁₈ and Xaa₁₉ with an alternative bond can reduce cleavage by carboxy peptidases and may increase half-life in the digestive tract. Bonds that can replace peptide bonds include: a retro-inverso bonds (C(O)—NH instead of NH—C(O); a reduced amide bond (NH—CH₂); a thiomethylene bond (S—CH₂ or CH₂—S); an oxomethylene bond. (O—CH₂ or CH₂—O); an ethylene bond (CH₂—CH₂); a thioamide bond (C(S)—NH); a trans-olefine bond (CH═CH); an fluoro substituted trans-olefine bond (CF═CH); a ketomethylene bond (C(O)—CHR or CHR—C(O) wherein R is H or CH₃; and a fluoro-ketomethylene bond (C(O)—CFR or CFR—C(O) wherein R is H or F or CH₃.

[0056] The peptides described herein can be modified using standard modifications. Modifications may occur at the amino (N—), carboxy (C—) terminus, internally or a combination of any of the preceeding. In one aspect described herein, there may be more than one type of modification of the peptide. Modifications include but are not limited to: acetylation, amidation, biotinylation, cinnamoylation, farnesylation, formylation, myristoylation, palmitoylation, phosphorylation (Ser. Tyr or Thr), stearoylation, succinylation, sulfurylation and cyclisation (via disulfide bridges or amide cyclisation), and modification by Cy3 or Cy5. The peptides described herein may also be modified by 2,4-dinitrophenyl (DNP), DNP-lysin; modification by 7-Amino-4-methyl-coumarin (AMC), flourescein, NBD (7-Nitrobenz-2-Oxa-1,3-Diazole), p-nitro-anilide, rhodamine B, EDANS (5-((2-arinoethyl)amino)naphthalene-1-sulfonic acid), dabcyl, dabsyl, dansyl, texas red, FMOC, and Tamra (Tetramethylrhodamine). The peptides described herein may also be conjugated to, for example, polyethylene glycol (PEG); alkyl groups (e.g., C1-C20 straight or branched alkyl groups); fatty acid radicals; combinations of PEG, alkyl groups and fatty acid radicals (see U.S. Pat. No. 6,309,633; Soltero et al., 2001 Innovations in Pharmaceutical Technology 106-110); BSA and KLH (Keyhole Limpet Hemocyanin). The addition of PEG and other polymers which can be used to modify polypeptides described herein is described in US2006019347 section IX.

[0057] The peptides and agonists described herein can be chemically modified to increase therapeutic activity by synthetically adding sugar moieties (WO 88/02756; WO 89/09786; DE 3910667 A1, EP 0 374 089 A2; and U.S. Pat. No. 4,861,755), adding cationic anchors (EP0363589), lipid moieties (WO91/09837; U.S. Pat. No. 4,837,303) or the substituents described as compounds I, II, and III in U.S. Pat. No. 5,552,520.

[0058] When Xaa₉ is Trp, Tyr or Phe or when Xaa₁₆ is Trp the peptide has a potentially functional chymotrypsin cleavage site that is located at a position where cleavage may alter GC-C receptor binding by the peptide. When Xaa₉ is Lys or Arg or when Xaa₁₆ is Lys or Arg, the peptide has a potentially functional trypsin cleavage site that is located at a position where cleavage may alter GC-C receptor binding by the peptide.

[0059] When Xaa₁₉ is Trp, Tyr or Phe, the peptide has a chymotrypsin cleavage site that is located at a position where cleavage will liberate the portion of the peptide carboxy-terminal to Xaa₁₉. When Xaa₁₉ is Leu, Ile or Val, the peptide can have a chymotrypsin cleavage site that is located at a position where cleavage will liberate the portion of the peptide amino-terminal to Xaa₁₉. At relatively high pH the same effect is seen when Xaa₁₉ is His. When Xaa₁₉ is Lys or Arg, the peptide has a trypsin cleavage site that is located at a position where cleavage will liberate portion of the peptide carboxy-terminal to Xaa₁₉. Thus, if the peptide includes an analgesic peptide carboxy-terminal to Xaa₁₉, the peptide will be liberated in the digestive tract upon exposure to the appropriate protease. Among the analgesic peptides which can be included in the peptide and/or coadministered with the peptide are: AspPhe (as Xaa₂₀Xaa₂₁), endomorphin-1, endomorphin-2, nocistatin, dalargin, lupron, ziconotide, and substance P and other analgesic peptides described herein. These peptides can, for example, be used to replace Xaa₂₀Xaa₂₁.

[0060] When Xaa₁ or the amino-terminal amino acid of the peptide described herein (e.g., Xaa₂ or Xaa₃) is Trp, Tyr or Phe, the peptide has a chymotrypsin cleavage site that is located at a position where cleavage will liberate the portion of the peptide amino-terminal to Xaa₁ (or Xaa₂ or Xaa₃) along with Xaa₁, Xaa₂ or Xaa₃. When Xaa₁ or the amino-terminal amino acid of the peptide described herein (e.g., Xaa₂ or Xaa₃) is Lys or Arg, the peptide has a trypsin cleavage site that is located at a position where cleavage will liberate portion of the peptide amino-terminal to Xaa₁ along with Xaa₁, Xaa₂ or Xaa₃). When Xaa₁ or the amino-terminal amino acid of the peptide described herein is Leu, Ile or Val, the peptide can have a chymotrypsin cleavage site that is located at a position where cleavage will liberate the portion of the peptide amino-terminal to Xaa₁. At relatively high pH the same effect is seen when Xaa₁ is His. Thus, for example, if the peptide includes an analgesic peptide amino-terminal to Xaa₁, the peptide will be liberated in the digestive tract upon exposure to the appropriate protease. Among the analgesic peptides which can be included in the peptide are: AspPhe, endomorphin-1, endomorphin-2, nocistatin, dalargin, lupron, and substance p and other analgesic peptides described herein.

[0061] In certain embodiments, when fully folded, disulfide bonds may be present between: Cys₆ and Cys₁₁; Cys₇ and Cys₁₅; and Cys₁₀ and Cys₁₈. In other embodiments, when fully folded, disulfide bonds may be present between: Cys₁ and Cys₆; Cys₂ and Cys₁₀; and Cys₅ and Cys₁₃. The peptides described herein bear some sequence similarity to ST peptides. However, they include amino acid changes and/or additions that improve functionality. These changes can, for example, increase or decrease activity (e.g., increase or decrease the ability of the peptide to stimulate intestinal motility), alter the ability of the peptide to fold correctly, alter the stability of the peptide, alter the ability of the peptide to bind the GC-C receptor and/or decrease toxicity. In some cases the peptides may function more desirably than wild-type ST peptide. For example, they may limit undesirable side effects such as diarrhea and dehydration.

[0062] In some embodiments one or both members of one or more pairs of Cys residues which normally form a disulfide bond can be replaced by homocysteine, penicillamine, 3-mercaptoproline (Kolodziej et al. 1996 Int J Pept Protein Res 48:274); β, β dimethylcysteine (Hunt et al. 1993 Int J Pept Protein Res 42:249) or diaminopropionic acid (Smith et al. 1978 J Med Chem 21:117) to form alternative internal cross-links at the positions of the normal disulfide bonds.

[0063] In addition, one or more disulfide bonds can be replaced by alternative covalent cross-links, e.g., an amide linkage (—CH₂CH(O)NHCH₂— or —CH₂NHCH(O)CH₂—), an ester linkage, a thioester linkage, a lactam bridge, a carbamoyl linkage, a urea linkage, a thiourea linkage, a phosphonate ester linkage, an alkyl linkage (—CH₂CH₂CH₂CH₂—), an alkenyl linkage(—CH₂CH═CHCH₂—), an ether linkage (—CH₂CH₂OCH₂— or —CH₂OCH₂CH₂—), a thioether linkage (—CH₂CH₂SCH₂— or —CH₂SCH₂CH₂—), an amine linkage (—CH₂CH₂NHCH₂— or —CH₂NHCH₂CH₂—) or a thioamide linkage (—CH₂CH(S)HNCH₂— or —CH₂NHCH(S)CH₂—). For example, Ledu et al. (Proc Nat'l Acad. Sci. 100:11263-78, 2003) describe methods for preparing lactam and amide cross-links. Schafineister et al. (J. Am. Chem. Soc. 122:5891, 2000) describes stable, hydrocarbon cross-links. Hydrocarbon cross links can be produced via metathesis (or methathesis followed by hydrogenation in the case of saturated hydrocarbons cross-links) using one or another of the Grubbs catalysts (available from Materia, Inc. and Sigma-Aldrich and described, for example, in U.S. Pat. Nos. 5,831,108 and 6,111,121). In some cases, the generation of such alternative cross-links requires replacing the Cys residues with other residues such as Lys or Glu or non-naturally occurring amino acids. In addition the lactam, amide and hydrocarbon cross-links can be used to stabilize the peptide even if they link amino acids at postions other than those occupied by Cys. Such cross-links can occur between two amino acids that are separated by two amino acids or between two amino acids that are separated by six amino acids (see, e.g., Schafineister et al. (J. Am. Chem. Soc. 122:5891, 2000)).

[0064] In the case of a peptide comprising the sequence (I): Xaa₁ Xaa₂ Xaa₃ Xaa₄ Xaa₅ Cys₆ Cys₇ Xaa₈ Xaa₉ Cys₁₀ Cyst₁₁ Xaa₁₂ Xaa₁₃ Xaa₁₄ Cys₁₅ Xaa₁₆ Xaa₁₇ Cys₁₈ Xaa₁₉ Xaa₂₀Xaa₂₁ or Xaa₁ Xaa₂ Xaa₃ Xaa₄ Xaa₅ Cys Cys Glu Xaa₉ Cys Cys Asn Pro Ala Cys Thr Gly Cys Tyr Xaa₂₀ Xaa₂₁ (H) wherein: Xaa₁ Xaa₂ Xaa₃ Xaa₄ Xaa₅ is missing and/or the sequence Xaa₁₉ Xaa₂₀Xaa₂₁ is missing, the peptide can still contain additional carboxy terminal or amino terminal amino acids or both. For example, the peptide can include an amino terminal sequence that facilitates recombinant production of the peptide and is cleaved prior to administration of the peptide to a patient. The peptide can also include other amino terminal or carboxyterminal amino acids. In some cases the additional amino acids protect the peptide, stabilize the peptide or alter the activity of the peptide. In some cases some or all of these additional amino acids are removed prior to administration of the peptide to a patient. The peptide can include 1, 2, 3, 4, 5, 10, 15, 20, 25, 30, 40, 50, 60, 70 80, 90, 100 or more amino acids at its amino terminus or carboxy terminus or both. The number of flanking amino acids need not be the same. For example, there can be 10 additional amino acids at the amino terminus of the peptide and none at the carboxy terminus.

[0065] In one embodiment the peptide comprises the amino acid sequence (I): Xaa₁ Xaa₂ Xaa₃ Xaa₄Xaa₅Cys₆ Cys₇ Xaa₈ Xaa₉ Cys₁₀ Cys₁₁ Xaa₁₂ Xaa₁₃ Xaa₁₄ Cys₁₅ Xaa₁₆ Xaa₁₇ Cys₁₈ Xaa₁₉ Xaa₂₀ Xaa₂₁ wherein: Xaa₁ Xaa₂ Xaa₃ Xaa₄ Xaa₅ is missing; Xaa₈ is Glu; Xaa₉ is Leu, Ile, Lys, Arg, Trp, Tyr or Phe; Xaa₁₂ is Asn; Xaa₁₃ is Pro; Xaa₁₄ is Ala; Xaa₁₆ is Thr, Ala, Lys, Arg, Trp; Xaa₁₇ is Gly, Xaa₁₉ is Tyr or Leu; and Xaa₂₀ Xaa₂₁ is AspPhe or is missing. Where Xaa₂₀ Xaa₂₁ and/or Xaa₁ Xaa₂ Xaa₃ Xaa₄ Xaa₅ are missing, there may be additional flanking amino acids in some embodiments. In certain embodiments of a composition comprising a peptide having the sequence (I): Xaa₁ Xaa₂ Xaa₃ Xaa₄ Xaa₅ Cys₆ Cys₇ Xaa₈ Xaa₉ Cys₁₀ Cys₁₁ Xaa₁₂ Xaa₁₃ Xaa₁₄ Cys₁₅ Xaa₁₆ Xaa₁₇ Cys₁₈ Xaa₁₉ Xaa₂₀ Xaa₂₁, the peptide does not comprise or consist of any of the peptides of Table I.

[0066] In a second aspect, the invention also features a therapeutic or prophylactic method comprising administering to a patient a pharmaceutical composition comprising or consisting essentially of a purified peptide comprising, consisting of or consisting essentially of the amino acid sequence: Xaa₁ Xaa₂ Xaa₃ Xaa₄ Xaa₅ Cys₆ Cys₇ Xaa₈ Xaa₉ Cys₁₀Cys₁₁ Xaa₁₂ Xaa₁₃ Xaa₁₄ Cys₁₅ Xaa₁₆ Xaa₁₇ Cys₁₈ Xaa₁₉ Xaa₂₀ Xaa₂₁ (1) or Xaa₁ Xaa₂Xaa₃Xaa₄Xaa₅Cys₆ Cys₇ Xaa₈Xaa₉ Cys₁₀ Cys₁₁ Asn₁₂Pro₁₃ Ala₁₄ Cys₁₅ Xaa₁₆ Gly₁₇ Cys₁₈ Xaa₁₉ Xaa₂₀ Xaa₂₁ (II) or Cys Cys Glu Xaa₄ Cys Cys Asn Pro Ala Cys Thr Gly Cys Xaa₁₄ (SEQ ID NO:XXX) as described herein.

[0067] The peptides can be co-administered with or linked, e.g., covalently linked to any of a variety of other peptides or compounds including analgesic peptides or analgesic compounds including, without limitation, the agents described herein.

[0068] Amino acid, non-amino acid, peptide and non-peptide spacers can be interposed between a peptide that is a GC-C receptor agonist and a peptide that has some other biological function, e.g., an analgesic peptide or a peptide used to treat obesity. The linker can be one that is cleaved from the flanking peptides in vivo or one that remains linked to the flanking peptides in vivo. For example, glycine, beta-alanine, glycyl-glycine, glycyl-beta-alanine, gamma-aminobutyric acid, 6-aminocaproic acid, L-phenylalanine, L-tryptophan and glycil-L-valil-L-phenylalanine can be used as spacers (Chaltin et al. 2003 Helvetica Chimica Acta 86:533-547; Caliceti et al. 1993 FARMCO 48:919-32) as can polyethylene glycols (Butterworth et ad. 1987 J. Med. Chem. 30:1295-302) and maleimide derivatives (King et al. 2002 Tetrahedron Lett. 43:1987-1990). Various other linkers are described in the literature (Nestler 1996 Molecular Diversity 2:3542; Finn et al. 1984 Biochemistry 23:2554-8; Cook et al. 1994 Tetrahedron Lett. 35:6777-80; Brokx et al. 2002 Journal of Controlled Release 78:115-123; Griffin et al. 2003 J. Am. Chem. Soc. 125:6517-6531; Robinson et al. 1998 Proc. Natl. Acad. Sci. USA 95:5929-5934). Linkers are also described in US20050171014, for example, amino acid linkers such as FALA, VLALA, ALAL, ALALA, 2-cyclohcxyl-L-alanine-LALA, 2-cyclohexyl-L-alanine-2-cyclohexyl-L-alanine-LAL, 1-naphtyl-alanine-ChaLAL and 1-naphtyl-alanine-LALA. Peptides and agonists described herein can also be conjugated to: an affinity tag (such as (histidine 6) H6), a HIV tat peptide residues 49-57, HIV tat peptide residues 49-56, the tat sequence YGRKKRRQRRR, a polyarginine peptide having from 6 to 20 residues (such as R6) and the following peptide sequences: YARKARRQARR, YARAAARQARA, YARAARRAAR, YARAARRAARA, ARRRRRRRRR, and YAAARRRRRRR, which are disclosed in WO 99/29721 and in U.S. Pat. No. 6,221,355 (seq. id. nos. 3-8).

[0069] The peptides described herein can be attached to one, two or more different moieties each providing the same or different functions. For example, the peptide can be linked to a molecule that is an analgesic and to a peptide that is used to treat obesity. The peptide and various moieties can be ordered in various ways. For example, a peptide described herein can have an analgesic peptide linked to its amino terminus and an anti-obesity peptide linked to its carboxy terminus. The additional moieties can be directly covalently bonded to the peptide or can be bonded via linkers.

[0070] The peptides described herein can be a cyclic peptide or a linear peptide. In addition, multiple copies of the same peptide can be incorporated into a single cyclic or linear peptide.

[0071] The peptides can include the amino acid sequence of a peptide that occurs naturally in a vertebrate (e.g., mammalian) species or in a bacterial species. In addition, the peptides can be partially or completely non-naturally occurring peptides. Also within the invention are peptidomimetics corresponding to the peptides described herein.

[0072] In various embodiments, the patient is suffering from a gastrointestinal disorder; the patient is suffering from a disorder selected from the group consisting of, gastrointestinal motility disorders, chronic intestinal pseudo-obstruction, colonic pseudo-obstruction, Crohn's disease, duodenogastric reflux, dyspepsia, functional dyspepsia, nonulcer dyspepsia, a functional gastrointestinal disorder, functional heartburn, gastroesophageal reflux disease (GERD), gastroparesis, irritable bowel syndrome, post-operative ileus, ulcerative colitis, chronic constipation, and disorders and conditions associated with constipation (e.g. constipation associated with use of opiate pain killers, post-surgical constipation, and constipation associated with neuropathic disorders as well as other conditions and disorders are described herein); the patient is suffering from a gastrointestinal motility disorder, chronic intestinal pseudo-obstruction, colonic pseudo-obstruction, Crohn's disease, duodenogastric reflux, dyspepsia, functional dyspepsia, nonulcer dyspepsia, a functional gastrointestinal disorder, functional heartburn, gastroesophageal reflux disease (GERD), gastroparesis, inflammatory bowel disease, irritable bowel syndrome (e.g. d-IBS, c-IBS, and/or a-IBS), post-operative ileus, ulcerative colitis, chronic constipation, and disorders and conditions associated with constipation (e.g. constipation associated with use of opiate pain killers, post-surgical constipation, and constipation associated with neuropathic disorders as well as other conditions and disorders are described herein); the patient has been diagnosed with a functional gastrointestinal disorder according to the Rome Criteria (e.g. Rome II), the patient has been diagnosed with irritable bowel syndrome (e.g. (e.g. diarrhea predominant-IBS, constipation predominant-IBS, and/or alternating-IBS), according to the Rome Criteria (e.g. Rome II); the composition is administered orally; the peptide comprises 30 or fewer amino acids, the peptide comprises 20 or fewer amino acids, the peptide comprises no more than 5 amino acids prior to Cys₆; the peptide comprises 14 amino acids, the peptide comprises 13 amino acids; the peptide comprises 150, 140, 130, 120, 110, 100, 90, 80, 70, 60, 50, 40, or 30 or fewer amino acids. In other embodiments, the peptide comprises 20 or fewer amino acids. In other embodiments the peptide comprises no more than 20, 15, 10, or 5 peptides subsequent to Cys₁₈. In certain embodiments Xaa₁₉ is a chymotrypsin or trypsin cleavage site and an analgesic peptide is present immediately following Xaa₁₉.

[0073] In a third aspect, the invention features a method for treating a patient suffering from constipation. Clinically accepted criteria that define constipation include the frequency of bowel movements, the consistency of feces and the ease of bowel movement. One common definition of constipation is less than three bowel movements per week. Other definitions include abnormally hard stools or defecation that requires excessive straining (Schiller 2001, Aliment Pharmacol Ther 15:749-763). Constipation may be idiopathic (functional constipation or slow transit constipation) or secondary to other causes including neurologic, metabolic or endocrine disorders. These disorders include diabetes mellitus, hypothyroidism, hyperthyroidism, hypocalcaemia, Multiple Sclerosis, Parkinson's disease, spinal cord lesions, Neurofibromatosis, autonomic neuropathy, Chagas disease, Hirschsprung's disease and Cystic fibrosis. Constipation may also be the result of surgery (postoperative ileus) or due to the use of drugs such as analgesics (like opioids), antihypertensives, anticonvulsants, antidepressants, antispasmodics and antipsychotics. The method of treating constipation comprises administering a pharamaceutical composition comprising or consisting essentially of a peptide comprising, consisting of or consisting essentially of the amino acid sequence: Xaa₁ Xaa₂ Xaa₃ Xaa₄ Xaa₅ Cys₆ Cys₇ Xaa₈ Xaa₉ Cys₁₀ Cys₁₁ Xaa₁₂ Xaa₁₃ Xaa₁₄ Cys₁₅ Xaa₁₆ Xaa₁₇ Cys₁₈ Xaa₁₉ Xaa₂₀ Xaa₂₁ (I) or Xaa₁ Xaa₂ Xaa₃ Xaa₄ Xaa₅ Cys₆ Cys₇ Xaa₈ Xaa₉ Cys₁₀ Cys₁₁ Asn₁₂ Pro₁₃ Ala₁₄ Cys₁₅ Xaa₁₆ Gly₁₇ Cys₁₈ Xaa₁₉ Xaa₂₀ Xaa₂₁ (II) or Cys Cys Glu Xaa₄ Cys Cys Asn Pro Ala Cys Thr Gly Cys Xaa₁₄ (SEQ ID NO:XXX) as described herein.

[0074] In various embodiments, the constipation is associated with use of a therapeutic agent; the constipation is associated with a neuropathic disorder; the constipation is post-surgical constipation (postoperative ileus); and the constipation associated with a gastrointestinal disorder; the constipation is idiopathic (functional constipation or slow transit constipation); the constipation is spinal chord injury induced; the constipation is thyroid disease related; the constipation is associated with neuropathic, metabolic or endocrine disorder (e.g., diabetes mellitus, hypothyroidism, hyperthyroidism, hypocalcaemia, Multiple Sclerosis, Parkinson's disease, spinal cord lesions, neurofibromatosis, autonomic neuropathy, Chagas disease, Hirschsprung's disease or is cystic fibrosis). Constipation may also be the result of surgery (postoperative ileus) or due the use of drugs such as analgesics (e.g., opioids), antihypertensives, anticonvulsants, antidepressants, antispasmodics and antipsychotics.

[0075] In a fourth aspect, the invention features a method for treating a patient suffering a gastrointestinal disorder, the method comprising administering to the patient a pharmaceutical composition comprising or consisting essentially of a purified peptide comprising, consisting of or consisting essentially of the amino acid sequence: Xaa₁ Xaa₂ Xaa₃ Xaa₄ Xaa₅ Cys₆ Cys₇ Xaa₈ Xaa₉ Cys₁₀ Cys₁₁ Xaa₁₂ Xaa₁₃ Xaa₁₄ Cys₁₅ Xaa₁₆ Xaa₁₇ Cys₁₈ Xaa₁₉ Xaa₂₀ Xaa₂₁ (I) or Xaa₁ Xaa₂ Xaa₃ Xaa₄ Xaa₅ Cys₆ Cys₇ Xaa₈ Xaa₉ Cys₁₀ Cys₁₁ Asn₁₂ Pro₁₃ Ala₁₄ Cys₁₅ Xaa₁₆ Gly₁₇ Cys₁₈ Xaa₁₉ Xaa₂₀ Xaa₂₁ (II) or Cys Cys Glu Xaa₄ Cys Cys Asn Pro Ala Cys Thr Gly Cys Xaa₁₄ (SEQ ID NO:XXX) as described herein.

[0076] In various embodiments, the patient is suffering from a gastrointestinal disorder; the patient is suffering from a disorder selected from the group consisting of: gastrointestinal motility disorders, chronic intestinal pseudo-obstruction, colonic pseudo-obstruction, Crohn's disease, duodenogastric reflux, dyspepsia, functional dyspepsia, nonulcer dyspepsia, a functional gastrointestinal disorder, functional heartburn, gastroesophageal reflux disease (GERD), gastroparesis, irritable bowel syndrome, post-operative ileus, ulcerative colitis, chronic constipation, and disorders and conditions associated with constipation (e.g. constipation associated with use of opiate pain killers, post-surgical constipation, and constipation associated with neuropathic disorders as well as other conditions and disorders are described herein), obesity, congestive heart failure, or benign prostatic hyperplasia.

[0077] In a fifth aspect, the invention features a method for increasing gastrointestinal motility in a patient, the method comprising administering to a patient a pharmaceutical composition comprising a purified peptide comprising, consisting of or consisting essentially of the amino acid sequence: Xaa₁ Xaa₂ Xaa₃ Xaa₄ Xaa₅ Cys₆ Cys₇ Xaa₈ Xaa₉ Cys₁₀ Cys₁₁ Xaa₁₂ Xaa₁₃ Xaa₁₄ Cys₁₅ Xaa₁₆ Xaa₁₇ Cys₁₈ Xaa₁₉ Xaa₂₀Xaa₂₁ (I) or Xaa₁ Xaa₂ Xaa₃ Xaa₄ Xaa₅ Cys₆ Cys₇ Xaa₈ Xaa₉ Cys₁₀ Cys₁₁ Asn₁₂ Pro₁₃, Ala₁₄ Cys₁₅ Xaa₁₆ Gly₁₇ Cys₁₈ Xaa₁₉ Xaa₂₀ Xaa₂₁ (II) or Cys Cys Glu Xaa₄ Cys Cys Asn Pro Ala Cys Thr Gly Cys Xaa₁₄ (SEQ ID INO:XXX) as described herein.

[0078] In a sixth aspect, the invention features a method for increasing the activity of (activating) an intestinal guanylate cyclase (GC-C) receptor in a patient, the method comprising administering to a patient a pharmaceutical composition comprising a purified peptide comprising, consisting of or consisting essentially of the amino acid sequence: Xaa₁ Xaa₂ Xaa₃ Xaa₄ Xaa₅ Cys₆ Cys₇ Xaa₈ Xaa₉ Cys₁₀ Cys₁₁ Xaa₁₂ Xaa₁₃ Xaa₁₄ Cys₁₅ Xaa₁₆ Xaa₁₇ Cys₁₈ Xaa₁₉ Xaa₂₀Xaa₂₁ (I) or Xaa₁ Xaa₂Xaa₃ Xaa₄Xaa₅ Cys₆ Cys₇ Xaa₈ Xaa₉ Cys₁₀ Cys₁₁ Asn₁₂ Pro₁₃ Ala₁₄ Cys₁₅ Xaa₁₆ Gly₁₇ Cys₁₈ Xaa₁₉ Xaa₂₀ Xaa₂₁ (II) or Cys Cys Glu Xaa₄ Cys Cys Asn Pro Ala Cys Thr Gly Cys Xaa₁₄ (SEQ ID NO:XXX) as described herein.

[0079] In a seventh aspect, the invention features an isolated nucleic acid molecule comprising a nucleotide sequence encoding a polypeptide comprising the amino acid sequence: Xaa₁ Xaa₂ Xaa₃ Xaa₄ Xaa₅ Cys₆ Cys₇ Xaa₈ Xaa₉ Cys₁₀ Cys₁₁ Xaa₁₂ Xaa₁₃ Xaa₁₄ Cys₁₅ Xaa₁₆ Xaa₁₇ Cys₁₈ Xaa₁₉ Xaa₂₀ Xaa₂₁ (I) or Xaa₁ Xaa₂ Xaa₃ Xaa₄ Xaa₅ Cys₆ Cys₇ Xaa₈ Xaa₉ Cys₁₀ Cys₁₁ Asn₁₂ Pro₁₃ Ala₁₄ Cys₁₅ Xaa₁₆ Gly₁₇ Cys₁₈ Xaa₁₉ Xaa₂₀ Xaa₂₁ (II) or Cys Cys Glu Xaa₄ Cys Cys Asn Pro Ala Cys Thr Gly Cys Xaa₁₄ (SEQ ID NO:XXX) as described herein.

[0080] In an eighth aspect the invention features a method for treating constipation, the method comprising administering an agonist of the intestinal guanylate cyclase (GC-C) receptor. In various embodiments: the agonist is a peptide, the peptide includes two Cys that form one disulfide bond, the peptide includes four Cys that form two disulfide bonds, and the peptide includes six Cys that form three disulfide bonds.

[0081] In a ninth aspect, the invention features a method for treating a gastrointestinal disorder, gastrointestinal motility disorders, chronic intestinal pseudo-obstruction, colonic pseudo-obstruction, Crohn's disease, duodenogastric reflux, dyspepsia, functional dyspepsia, nonulcer dyspepsia, a functional gastrointestinal disorder, functional heartburn, gastroesophageal reflux disease (GERD), gastroparesis, irnitable bowel syndrome, post-operative ileus, ulcerative colitis, chronic constipation, and disorders and conditions associated with constipation (e.g. constipation associated with use of opiate pain killers, post-surgical constipation, and constipation associated with neuropathic disorders as well as other conditions and disorders are described herein), obesity, congestive heart failure, or benign prostatic hyperplasia, the method comprising administering an agonist of the intestinal guanylate cyclase (GC-C) receptor either orally, by rectal suppository, or parenterally. In various embodiments: the agonist is a peptide, the peptide includes two Cys that form one disulfide bond, the peptide includes four Cys that form two disulfide bonds, and the peptide includes six Cys that form three disulfide bonds.

[0082] In a tenth aspect, the invention features a method for treating a gastrointestinal disorder selected from the group consisting of: gastrointestinal motility disorders, chronic intestinal pseudo-obstruction, colonic pseudo-obstruction, Crohn's disease, duodenogastric reflux, dyspepsia, functional dyspepsia, nonulcer dyspepsia, a functional gastrointestinal disorder, functional heartburn, gastroesophageal reflux disease (GERD), gastroparesis, irritable bowel syndrome, post-operative ileus, ulcerative colitis, chronic constipation, and disorders and conditions associated with constipation (e.g. constipation associated with use of opiate pain killers, post-surgical constipation, and constipation associated with neuropathic disorders as well as other conditions and disorders are described herein), the method comprising administering an agonist of the intestinal guanylate cyclase (GC-C) receptor. In various embodiments the composition is adminstered orally; the peptide comprises 30 or fewer amino acids, the peptide comprises 20 or fewer amino acids, the peptide comprises, consists essentially, consists of 14 amino acids, the peptide comprises, consists essentially, consists of 13 amino acids, and the peptide comprises no more than 5 amino acids prior to Cys₆.

[0083] In various embodiments: the agonist is a peptide, the peptide includes two Cys that form one disulfide bond, the peptide includes four Cys that form two disulfide bonds, and the peptide includes six Cys that form three disulfide bonds.

[0084] In an eleventh aspect, the invention features a method for treating obesity, the method comprising administering a complete or partial agonist of the intestinal guanylate cyclase (GC-C) receptor. In various embodiments: the agonist is a peptide, the peptide includes two Cys that form one disulfide bond, the peptide includes four Cys that form two disulfide bonds, and the peptide includes six Cys that form three disulfide bonds. The agonist can be administered alone or in combination with one or more agents for treatment of obesity, including but not limited to the anti-obesity agents described herein. Thus, for example, PYY₃₋₃₆ can be fused to the carboxy or amino terminus of a peptide described herein. Such a fusion protein can include a chymostrysin or trypsin cleavage site that can permit cleavage to separate the two peptides.

[0085] In a twelfth aspect, the invention features a method for treating obesity, the method comprising administering to a patient a pharmaceutical composition comprising or consisting essentially of a purified peptide comprising, consisting of or consisting essentially of the amino acid sequence: Xaa₁ Xaa₂ Xaa₃ Xaa₄ Xaa₅ Cys₆ Cys₇ Xaa₈ Xaa₉ Cys₁₀ Cys₁₁ Xaa₁₂ Xaa₁₃ Xaa₁₄ Cys₁₅ Xaa₁₆ Xaa₁₇ Cys₁₈ Xaa₁₉ Xaa₂₀ Xaa₂₁ (I) or Xaa₁ Xaa₂ Xaa₃ Xaa₄ Xaa₅ Cys₆ Cys₇ Xaa₈ Xaa₉ Cys₁₀ Cys₁₁ Asn₁₂ Pr₁₃ Ala₁₄ Cys₁₅ Xaa₁₆ Gly₁₇ Cys₁₈ Xaa₁₉ Xaa₂₀Xaa₂₁ (II) or Cys Cys Glu Xaa₄ Cys Cys Asn Pro Ala Cys Thr Gly Cys Xaa₁₄ (SEQ ID NO:XXX) as described herein.

[0086] In a thirteenth aspect, the invention features a composition comprising or consisting essentially of a purified peptide comprising, consisting of or consisting essentially of the amino acid sequence: Xaa₁ Xaa₂ Xaa₃ Xaa₄ Xaa₅ Cys₆ Cys₇ Xaa₈ Xaa₉ Cys₁₀ Cys₁₁ Xaa₁₂ Xaa₁₃ Xaa₁₄ Cys₁₅ Xaa₁₆ Xaa₁₇ Cys₁₈ Xaa₁₉ Xaa₂₀ Xaa₂₁ (I) or Xaa₁ Xaa₂ Xaa₃ Xaa₄ Xaa₅ Cys₆ Cys₇ Xaa₈ Xaa₉ Cys₁₀ Cys₁₁ Asn₁₂ Pro₁₃ Ala₁₄ Cys₁₅ Xaa₁₆ Gly₁₇ Cys₁₈ Xaa₁₉ Xaa₂₀ Xaa₂₁ (II) or Cys Cys Glu Xaa₄ Cys Cys Asn Pro Ala Cys Thr Gly Cys Xaa₁₄ (SEQ ID NO:XXX) as described herein. In one embodiment, the composition is a pharmaceutical composition.

[0087] In a fourteenth aspect, the invention features a method for treating congestive heart failure, the method comprising administering to a patient a pharmaceutical composition comprising or consisting essentially of a purified peptide comprising, consisting of or consisting essentially of the amino acid sequence: Xaa₁ Xaa₂ Xaa₃ Xaa₄ Xaa₅ Cys₆ Cys₇ Xaa₈ Xaa₉ Cys₁₀ Cys₁₁ Xaa₁₂ Xaa₁₃ Xaa₁₄ Cys₁₅ Xaa₁₆ Xaa₁₇ Cys₁₈ Xaa₁₉ Xaa₂₀Xaa₂₁ (I) or Xaa₁ Xaa₂ Xaa₃ Xaa₄ Xaa₅ Cys₆ Cys₇ Xaa₈ Xaa₉ Cys₁₀ Cys₁₁ Asn₁₂ Pro₁₃ Ala₁₄ Cys₁₅ Xaa₁₆ Gly₁₇ Cys₁₈ Xaa₁₉ Xaa₂₀Xaa₂₁ (II) or Cys Cys Glu Xaa₄ Cys Cys Asn Pro Ala Cys Thr Gly Cys Xaa₁₄ (SEQ ID NO:XXX) as described herein.

[0088] The peptide can be administered in combination with one or more agents for treatment of congestive heart failure, for example, a natriuretic peptide such as atrial natriuretic peptide, brain natriuretic peptide or C-type natriuretic peptide), a diuretic, or an inhibitor of angiotensin converting enzyme.

[0089] In a fifteenth aspect, the invention features a method for treating benign prostatic hyperplasia, the method comprising administering to a patient a pharmaceutical composition comprising a purified peptide comprising, consisting of or consisting essentially of the amino acid sequence: Xaa₁ Xaa₂ Xaa₃ Xaa₄ Xaa₅ Cys₆ Cys₇ Xaa₈ Xaa₉ Cys₁₀ Cys₁₁ Xaa₁₂ Xaa₁₃ Xaa₁₄ Cys₁₅ Xaa₁₆ Xaa₁₇ Cys₁₈ Xaa₁₉ Xaa₂₀ Xaa₂₁ (I) or Xaa₁ Xaa₂Xaa₃Xaa₄Xaa₅ Cys₆ Cys₇ Xaa₈ Xaa₉ Cys₁₀ Cys₁₁ Asn₁₂ Pro₁₃ Ala₁₄ Cys₁₅ Xaa₁₆ Gly₇ Cys₁₈ Xaa₁₉ Xaa₂₀Xaa₂₁ (II) or Cys Cys Glu Xaa₄ Cys Cys Asn Pro Ala Cys Thr Gly Cys Xaa₁₄ (SEQ ID NO:XXX) as described herein. The peptide can be administered alone or in combination with another agent for treatment of BPH, for example, a 5-alpha reductase inhibitor (e.g., finasteride) or an alpha adrenergic inhibitor (e.g., doxazosine).

[0090] In a sixteenth aspect, the invention features a method for treating or reducing pain, including visceral pain, pain associated with a gastrointestinal disorder or pain associated with some other disorder, the method comprising administering to a patient a pharmaceutical composition comprising or consisting essentially of a purified peptide comprising, consisting of or consisting essentially of the amino acid sequence: Xaa₁ Xaa₂ Xaa₃Xaa₄Xaa₅ Cys₆ Cys₇ Xaa₈ Xaa₉ Cys₁₀ Cys₁₁ Xaa₁₂ Xaa₁₃ Xaa₁₄ Cys₁₅ Xaa₁₆ Xaa₁₇ Cys₁₈ Xaa₁₉ Xaa₂₀ Xaa₂₁ (I) or Xaa₁ Xaa₂ Xaa₃ Xaa₄ Xaa₅ Cys₆ Cys₇ Xaa₈ Xaa₉ Cys₁₀ Cys₁₁ Asn₁₂ Pro₁₃ Ala₁₄ Cys₁₅ Xaa₁₆ Gly₁₇ Cys₁₈ Xaa₁₉ Xaa₂₀ Xaa₂₁ (II) or Cys Cys Glu Xaa₄ Cys Cys Asn Pro Ala Cys Thr Gly Cys Xaa₁₄ (SEQ ID NO:XXX) as described herein.

[0091] In a seventeenth aspect, the invention features a method for treating inflammation, including inflammation of the gastrointestinal tract, e.g., inflammation associated with a gastrointestinal disorder or infection or some other disorder, the method comprising administering to a patient a pharmaceutical composition comprising a purified peptide comprising, consisting of or consisting essentially of the amino acid sequence: Xaa₁ Xaa₂ Xaa₃ Xaa₄ Xaa₅ Cys₆ Cys₇ Xaa₈ Xaa₉ Cys₁₀ Cys₁₁ Xaa₁₂ Xaa₁₃ Xaa₁₄ Cys₁₅ Xaa₁₆ Xaa₁₇ Cys₁₈ Xaa₁₉ Xaa₂₀ Xaa₂₁ (I) or Xaa₁ Xaa₂ Xaa₃ Xaa₄ Xaa₅ Cys₆ Cys₇ Xaa₈ Xaa₉ Cys₁₀ Cys₁₁ Asn₁₂ Pro₁₃ Ala₁₄ Cys₁₅ Xaa₁₆ Gly₁₇ Cys₁₈ Xaa₁₉ Xaa₂₀Xaa₂₁ (II) or Cys Cys Glu Xaa₄ Cys Cys Asn Pro Ala Cys Thr Gly Cys Xaa₁₄ (SEQ ID NO:XXX) as described herein.

[0092] In an eighteenth aspect, the invention features a method for treating congestive heart failure, the method comprising administering a complete or partial agonist of the intestinal guanylate cyclase (GC-C) receptor. Thus, the invention features a method for treating congestive heart failure, the method comprising administering to a patient a pharmaceutical composition comprising a purified peptide comprising, consisting of or consisting essentially of the amino acid sequence: Xaa₁ Xaa₂ Xaa₃ Xaa₄ Xaa₅ Cys₆ Cys₇ Xaa₈ Xaa₉ Cys₁₀ Cys₁₁ Xaa₁₂ Xaa₁₃ Xaa₁₄ Cys₁₅ Xaa₁₆ Xaa₁₇ Cys₁₈ Xaa₁₉ Xaa₂₀ Xaa₂₁ (I) or Xaa₁ Xaa₂ Xaa₃ Xaa₄ Xaa₅ Cys₆ Cys₇ Xaa₈ Xaa₉ Cys₁₀ Cys₁₁ Asn₁₂ Pro₁₃ Ala₁₄ Cys₁₅ Xaa₁₆ Gly₁₇ Cys₁₈ Xaa₁₉ Xaa₂₀ Xaa₂₁ (II) or Cys Cys Glu Xaa₄ Cys Cys Asn Pro Ala Cys Thr Gly Cys Xaa₁₄ (SEQ ID NO:XXX) as described herein. The agonist/peptide can be administered alone or in combination with another agent for treatment of congestive heart failure, for example, a natriuretic peptide such as atrial natriuretic peptide, brain natriuretic peptide or C-type natriuretic peptide, a diuretic, or an inhibitor of angiotensin converting enzyme. In various embodiments the congestive heart failure is categorized as Class II congestive heart failure; the congestive heart failure is categorized as Class III congestive heart failure; and the congestive heart failure is categorized as Class IV congestive heart failure. The New York Heart Association (NYHA),functional classification system relates congestive heart failure symptoms to everyday activities and the patient's quality of life. The NYHA defines the classes of patient symptoms relating to congestive heart failure as: Class II-slight limitation of physical activity, comfortable at rest, but ordinary physical activity results in fatigue, palpitation, or dyspnea; Class III-marked limitation of physical activity, comfortable at rest, but less than ordinary activity causes fatigue, palpitation, or dyspnea and Class IV- unable to carry out any physical activity without discomfort, symptoms of cardiac insufficiency at rest, if any physical activity is undertaken, discomfort is increased. Heart failure treatment using the polypeptides and methods described herein can also be classified according to the ACC/AHA guidelines (Stage A: At risk for developing heart failure without evidence of cardiac dysfunction; Stage B: Evidence of cardiac dysfunction without symptoms; Stage C: Evidence of cardiac dysfunction with symptoms; and Stage D: Symptoms of heart failure despite maximal therapy).

[0093] In a nineteenth aspect, the invention features a method for treating BPH, the method comprising administering a complete or partial agonist of the intestinal guanylate cyclase (GC-C) receptor. The agonist can be administered alone or in combination with another agent for treatment of BPH, for example, a 5-alpha reductase inhibitor (e.g., finasteride) or an alpha adrenergic inhibitor (e.g., doxazosine).

[0094] In a twentieth aspect, the invention features isolated nucleic acid molecules comprising a sequence encoding a peptide described herein. Also within the invention are vectors, e.g., expression vectors that include such nucleic acid molecules and can be used to express a peptide described herein in a cultured cell (e.g., a eukaryotice cell or a prokaryotic cell). The vector can further include one or more regulatory elements, e.g., a heterologous promoter or elements required for translation operably linked to the sequence encoding the peptide. In some cases the nucleic acid molecule will encode an amino acid sequence that includes the amino acid sequence of a peptide described herein. For example, the nucleic acid molecule can encode a preprotein or a preproprotein that can be processed to produce a peptide described herein. In cases where unnatural amino acids are present in the polypeptides described herein, selector codons can be utilized in the synthesis of such polypeptides similar to that described in US20060019347 (for example, paragraphs 398-408, 457-499, and 576-588) herein incorporated by reference.

[0095] A vector that includes a nucleotide sequence encoding a peptide described herein or a peptide or polypeptide comprising a peptide described herein may be either RNA or DNA, single- or double-stranded, prokaryotic, eukaryotic, or viral. Vectors can include transposons, viral vectors, episomes, (e.g., plasmids), chromosomes inserts, and artificial chromosomes (e.g. BACs or YACs). Suitable bacterial hosts for expression of the encode peptide or polypeptide include, but are not limited to, E. coli. Suitable eukaryotic hosts include yeast such as S. cerevisiae, other fungi, vertebrate cells, invertebrate cells (e.g., insect cells), plant cells, human cells, human tissue cells, and whole eukaryotic organisms. (e.g., a transgenic plant or a transgenic animal). Further, the vector nucleic acid can be used to transfect a virus such as vaccinia or baculovirus (for example using the Bac-to-Bac® Baculovirus expression system (Invitrogen Life Technologies, Carlsbad, Calif.)).

[0096] As noted above the invention includes vectors and genetic constructs suitable for production of a peptide described herein or a peptide or polypeptide comprising such a peptide. Generally, the genetic construct also includes, in addition to the encoding nucleic acid molecule, elements that allow expression, such as a promoter and regulatory sequences. The expression vectors may contain transcriptional control sequences that control transcriptional initiation, such as promoter, enhancer, operator, and repressor sequences. A variety of transcriptional control sequences are well known to those in the art and may be functional in, but are not limited to, a bacterium, yeast, plant, or animal cell. The expression vector can also include a translation regulatory sequence (e.g., an untranslated 5′ sequence, an untranslated 3′ sequence, a poly A addition site, or an internal ribosome entry site), a splicing sequence or splicing regulatory sequence, and a transcription termination sequence. The vector can be capable of autonomous replication or it can integrate into host DNA.

[0097] The invention also includes isolated host cells harboring one of the forgoing nucleic acid molecules and methods for producing a peptide by culturing such a cell and recovering the peptide or a precursor of the peptide. Recovery of the peptide or precursor may refer to collecting the growth solution and need not involve additional steps of purification. Proteins of the present invention, however, can be purified using standard purification techniques, such as, but not limited to, affinity chromatography, thermaprecipitation, immunoaffinity chromatography, ammonium sulfate precipitation, ion exchange chromatography, filtration, electrophoresis and hydrophobic interaction chromatography.

[0098] The peptides can be purified. Purified peptides are peptides separated from other proteins, lipids, and nucleic acids or from the compounds from which is it synthesized. The polypeptide can constitute at least 10, 20, 50 70, 80 or 95% by dry weight of the purified preparation.

[0099] In a twenty-first aspect, the invention features a method of increasing the level of cyclic guanosine 3′-monophosphate (cGMP) in an organ, tissue (e.g, the intestinal mucosa), or cell (e.g., a cell bearing GC-A receptor) by administering to a patient a composition comprising or consisting essentially of a purified peptide comprising, consisting of or consisting essentially of the amino acid sequence: Xaa₁ Xaa₂ Xaa₃ Xaa₄ Xaa₅ Cys₆ Cys₇ Xaa₈ Xaa₉ Cys₁₀ Cys₁₁ Xaa₁₂ Xaa₁₃ Xaa₁₄ Cys₁₅ Xaa₁₆ Xaa₁₇ Cys₁₈ Xaa₁₉ Xaa₂₀ Xaa₂₁ (I) or Xaa₁ Xaa₂ Xaa₃ Xaa₄ Xaa₅ Cys₆ Cys₇ Xaa₈ Xaa₉ Cys₁₀ Cys₁₁ Asn₁₂ Pro)₃ Ala₁₄ Cys₁₅ Xaa₁₆ Gly₁₇ Cys₁₈ Xaa₁₉ Xaa₂₀Xaa₂₁ (II) or Cys Cys Glu Xaa₄ Cys Cys Asn Pro Ala Cys Thr Gly Cys Xaa₁₄ (SEQ ID NO:XXX) as described herein.

[0100] In a twenty-second aspect, the invention features polypeptides comprising, consisting or consisting essentially of the amino acid sequence Xaa₁ Xaa₂ Xaa₃ Xaa₄ Xaa₅ Cys₆ Cys₇ Xaa₈ Xaa₉ Cys₁₀ Cys₁₁ Xaa₁₂ Xaa₁₃ Xaa₁₄ Cys₁₅ Xaa₁₆ Xaa₁₇ Cys₁₈ Xaa₁₉ Xaa₂₀ Xaa₂₁ wherein: a) Xaa₈ or Xaa₉ is not present; b) neither Xaa₈ or Xaa₉ is present; c) one of Xaa₁₂, Xaa₁₃ and Xaa₁₄ is not present; d) two of Xaa₁₂, Xaa₁₃ and Xaa₁₄ are not present; e) three of Xaa₁₂, Xaa₁₃ and Xaa₁₄ are not present; f) one of Xaa₁₆ and Xaa₁₇ is not present; g) neither Xaa₁₆ or Xaa₁₇ is present and combinations thereof. In various embodiments, one, two, three, four or five of Xaa₁ Xaa₂ Xaa₃ Xaa₄ and Xaa₅ are not present. In other embodiments, one, two or three or Xaa₁₉ Xaa₂₀ and Xaa₂₁ are missing.

[0101] In twenty third aspect, the invention features a method for treating a disorder ameliorated by increasing cGMP levels, the method comprising administering a pharmaceutical composition comprising, consisting essentially of or consisting of a peptide or agonist described herein and a pharmaceutically acceptable carrier.

[0102] In a twenty-fourth aspect, the invention features a method for treating hypertension. The method comprises: administering to the patient a pharmaceutical composition comprising, consisting essentially of, or consisting of a peptide or agonist described herein and a pharmaceutically acceptable carrier. The composition can be administered in combination with another agent for treatment of hypertension, for example, a diuretic, an ACE inhibitor, an angiotensin receptor blocker, a beta-blocker, or a calcium channel blocker.

[0103] In a twenty-fifth aspect, the invention features a method for treating secondary hyperglycemias in connection with pancreatic diseases (chronic pancreatitis, pancreasectomy, hemochromatosis) or endocrine diseases (acrornegaly, Cushing's syndrome, pheochromocytoma or hyperthyreosis), drug-induced hyperglycemias (benzothiadiazine saluretics, diazoxide or glucocorticoids), pathologic glucose tolerance, hyperglycemias, dyslipoproteinemias, adiposity, hyperlipoprotemerias and/or hypotensions is described. The method comprises: administering to the patient a pharmaceutical composition comprising, consisting essentially of, or consisting of a peptide or agonist described herein and a pharmaceutically acceptable carrier.

[0104] In a twenty-sixth aspect, the invention features a method for decreasing gastrointestinal pain or visceral pain in a patient, the method comprising: administering to the patient a pharmaceutical composition comprising, consisting essentially of, or consisting of SEQ ID NO. 3 (or another peptide described herein) and a pharmaceutically acceptable carrier

[0105] Among the useful peptides are peptides comprising, consisting of or consisting essentially of the amino acid sequence Xaa₁ Xaa₂ Xaa₃ Xaa₄ Xaa₅ Cys Cys Glu Xaa₉ Cys Cys Asn Pro Ala Cys Thr Gly Cys Tyr Xaa₂₀ Xaa₂₁ (II) (SEQ ID NO: - - - ) are the following peptides:

| | |
|---|---|
| Gln Ser Ser Asn Tyr Cys Cys Glu Tyr Cys Cys Asn Pro Ala Cys Thr Gly Cys Tyr | (SEQ ID NO:---) |
| Asn Thr Ser Asn Tyr Cys Cys Glu Tyr Cys Cys Asn Pro Ala Cys Thr Gly Cys Tyr | (SEQ ID NO:---) |
| Asn Leu Ser Asn Tyr Cys Cys Glu Tyr Cys Cys Asn Pro Ala Cys Thr Gly Cys Tyr | (SEQ ID NO:---) |
| Asn Ile Ser Asn Tyr Cys Cys Glu Tyr Cys Cys Asn Pro Ala Cys Thr Gly Cys Tyr | (SEQ ID NO:---) |
| Asn Ser Ser Gln Tyr Cys Cys Glu Tyr Cys Cys Asn Pro Ala Cys Thr Gly Cys Tyr | (SEQ ID NO:---) |
| Ser Ser Asn Tyr Cys Cys Glu Tyr Cys Cys Asn Pro Ala Cys Thr Gly Cys Tyr | (SEQ ID NO:---) |
| Gln Ser Ser Gln Tyr Cys Cys Glu Tyr Cys Cys Asn Pro Ala Cys Thr Gly Cys Tyr | (SEQ ID NO:---) |
| Ser Ser Gln Tyr Cys Cys Glu Tyr Cys Cys Asn Pro Ala Cys Thr Gly Cys Tyr | (SEQ ID NO:---) |
| Asn Ser Ser Asn Tyr Cys Cys Glu Ala Cys Cys Asn Pro Ala Cys Thr Gly Cys Tyr | (SEQ ID NO: ) |
| Asn Ser Ser Asn Tyr Cys Cys Glu Arg Cys Cys Asn Pro Ala Cys Thr Gly Cys Tyr | (SEQ ID NO: ) |
| Asn Ser Ser Asn Tyr Cys Cys Glu Asn Cys Cys Asn Pro Ala Cys Thr Gly Cys Tyr | (SEQ ID NO: ) |
| Asn Ser Ser Asn Tyr Cys Cys Glu Asp Cys Cys Asn Pro Ala Cys Thr Gly Cys Tyr | (SEQ ID NO: ) |
| Asn Ser Ser Asn Tyr Cys Cys Glu Cys Cys Cys Asn Pro Ala Cys Thr Gly Cys Tyr | (SEQ ID NO: ) |
| Asn Ser Ser Asn Tyr Cys Cys Glu Gln Cys Cys Asn Pro Ala Cys Thr Gly Cys Tyr | (SEQ ID NO: ) |
| Asn Ser Ser Asn Tyr Cys Cys Glu Glu Cys Cys Asn Pro Ala Cys Thr Gly Cys Tyr | (SEQ ID NO: ) |
| Asn Ser Ser Asn Tyr Cys Cys Glu Gly Cys Cys Asn Pro Ala Cys Thr Gly Cys Tyr | (SEQ ID NO: ) |
| Asn Ser Ser Asn Tyr Cys Cys Glu His Cys Cys Asn Pro Ala Cys Thr Gly Cys Tyr | (SEQ ID NO: ) |
| Asn Ser Ser Asn Tyr Cys Cys Glu Ile Cys Cys Asn Pro Ala Cys Thr Gly Cys Tyr | (SEQ ID NO: ) |
| Asn Ser Ser Asn Tyr Cys Cys Glu Lys Cys Cys Asn Pro Ala Cys Thr Gly Cys Tyr | (SEQ ID NO: ) |
| Asn Ser Ser Asn Tyr Cys Cys Glu Met Cys Cys Asn Pro Ala Cys Thr Gly Cys Tyr | (SEQ ID NO: ) |
| Asn Ser Ser Asn Tyr Cys Cys Glu Phe Cys Cys Asn Pro Ala Cys Thr Gly Cys Tyr | (SEQ ID NO: ) |
| Asn Ser Ser Asn Tyr Cys Cys Glu Pro Cys Cys Asn Pro Ala Cys Thr Gly Cys Tyr | (SEQ ID NO: ) |
| Asn Ser Ser Asn Tyr Cys Cys Glu Ser Cys Cys Asn Pro Ala Cys Thr Gly Cys Tyr | (SEQ ID NO: ) |
| Asn Ser Ser Asn Tyr Cys Cys Glu Thr Cys Cys Asn Pro Ala Cys Thr Gly Cys Tyr | (SEQ ID NO: ) |
| Asn Ser Ser Asn Tyr Cys Cys Glu Trp Cys Cys Asn Pro Ala Cys Thr Gly Cys Tyr | (SEQ ID NO: ) |
| Asn Ser Ser Asn Tyr Cys Cys Glu Val Cys Cys Asn Pro Ala Cys Thr Gly Cys Tyr | (SEQ ID NO: ) |
| Cys Cys Glu Ala Cys Cys Asn Pro Ala Cys Thr Gly Cys Tyr | (SEQ ID NO: ) |
| Cys Cys Glu Arg Cys Cys Asn Pro Ala Cys Thr Gly Cys Tyr | (SEQ ID NO: ) |
| Cys Cys Glu Asn Cys Cys Asn Pro Ala Cys Thr Gly Cys Tyr | (SEQ ID NO: ) |
| Cys Cys Glu Asp Cys Cys Asn Pro Ala Cys Thr Gly Cys Tyr | (SEQ ID NO: ) |
| Cys Cys Glu Cys Cys Cys Asn Pro Ala Cys Thr Gly Cys Tyr | (SEQ ID NO: ) |
| Cys Cys Glu Gln Cys Cys Asn Pro Ala Cys Thr Gly Cys Tyr | (SEQ ID NO: ) |
| Cys Cys Glu Glu Cys Cys Asn Pro Ala Cys Thr Gly Cys Tyr | (SEQ ID NO: ) |
| Cys Cys Glu Gly Cys Cys Asn Pro Ala Cys Thr Gly Cys Tyr | (SEQ ID NO: ) |
| Cys Cys Glu His Cys Cys Asn Pro Ala Cys Thr Gly Cys Tyr | (SEQ ID NO: ) |
| Cys Cys Glu Ile Cys Cys Asn Pro Ala Cys Thr Gly Cys Tyr | (SEQ ID NO: ) |
| Cys Cys Glu Lys Cys Cys Asn Pro Ala Cys Thr Gly Cys Tyr | (SEQ ID NO: ) |
| Cys Cys Glu Met Cys Cys Asn Pro Ala Cys Thr Gly Cys Tyr | (SEQ ID NO: ) |
| Cys Cys Glu Phe Cys Cys Asn Pro Ala Cys Thr Gly Cys Tyr | (SEQ ID NO: ) |
| Cys Cys Glu Pro Cys Cys Asn Pro Ala Cys Thr Gly Cys Tyr | (SEQ ID NO: ) |
| Cys Cys Glu Ser Cys Cys Asn Pro Ala Cys Thr Gly Cys Tyr | (SEQ ID NO: ) |
| Cys Cys Glu Thr Cys Cys Asn Pro Ala Cys Thr Gly Cys Tyr | (SEQ ID NO: ) |
| Cys Cys Glu Trp Cys Cys Asn Pro Ala Cys Thr Gly Cys Tyr | (SEQ ID NO: ) |
| Cys Cys Glu Val Cys Cys Asn Pro Ala Cys Thr Gly Cys Tyr | (SEQ ID NO: ) |
| Cys Cys Glu Tyr Cys Cys Asn Pro Ala Cys Thr Gly Cys | (SEQ ID NO:6 ) |
| Cys Cys Glu Ala Cys Cys Asn Pro Ala Cys Thr Gly Cys | (SEQ ID NO: ) |
| Cys Cys Glu Arg Cys Cys Asn Pro Ala Cys Thr Gly Cys | (SEQ ID NO: ) |
| Cys Cys Glu Asn Cys Cys Asn Pro Ala Cys Thr Gly Cys | (SEQ ID NO: ) |
| Cys Cys Glu Asp Cys Cys Asn Pro Ala Cys Thr Gly Cys | (SEQ ID NO: ) |
| Cys Cys Glu Cys Cys Cys Asn Pro Ala Cys Thr Gly Cys | (SEQ ID NO: ) |
| Cys Cys Glu Gln Cys Cys Asn Pro Ala Cys Thr Gly Cys | (SEQ ID NO: ) |
| Cys Cys Glu Glu Cys Cys Asn Pro Ala Cys Thr Gly Cys | (SEQ ID NO: ) |
| Cys Cys Glu Gly Cys Cys Asn Pro Ala Cys Thr Gly Cys | (SEQ ID NO: ) |
| Cys Cys Glu His Cys Cys Asn Pro Ala Cys Thr Gly Cys | (SEQ ID NO: ) |
| Cys Cys Glu Ile Cys Cys Asn Pro Ala Cys Thr Gly Cys | (SEQ ID NO: ) |
| Cys Cys Glu Lys Cys Cys Asn Pro Ala Cys Thr Gly Cys | (SEQ ID NO: ) |
| Cys Cys Glu Met Cys Cys Asn Pro Ala Cys Thr Gly Cys | (SEQ ID NO: ) |
| Cys Cys Glu Phe Cys Cys Asn Pro Ala Cys Thr Gly Cys | (SEQ ID NO: ) |
| Cys Cys Glu Pro Cys Cys Asn Pro Ala Cys Thr Gly Cys | (SEQ ID NO: ) |
| Cys Cys Glu Ser Cys Cys Asn Pro Ala Cys Thr Gly Cys | (SEQ ID NO: ) |
| Cys Cys Glu Thr Cys Cys Asn Pro Ala Cys Thr Gly Cys; | (SEQ ID NO: ) |
| Cys Cys Glu Trp Cys Cys Asn Pro Ala Cys Thr Gly Cys | (SEQ ID NO: ) |
| Cys Cys Glu Val Cys Cys Asn Pro Ala Cys Thr Gly Cys. | (SEQ ID NO: ) |

[0106] Also useful are peptides comprising, consisting of or consisting essentially of any of the following sequences:

Cys Cys Glu Leu Cys Cys Ala Pro Ala Cys Thr Gly
Cys Tyr Cys Cys Glu Leu Cys Cys Val Pro Ala Cys
Thr Gly Cys Tyr Cys Cys Glu Leu Cys Cys Leu Pro
Ala Cys Thr Gly Cys Tyr Cys Cys Glu Leu Cys Cys
Ile Pro Ala Cys Thr Gly Cys Tyr Cys Cys Glu Leu
Cys Cys Pro Pro Ala Cys Thr Gly Cys Tyr Cys Cys
Glu Leu Cys Cys Met Pro Ala Cys Thr Gly Cys Tyr
Cys Cys Glu Leu Cys Cys Phe Pro Ala Cys Thr Gly
Cys Tyr Cys Cys Glu Leu Cys Cys Trp Pro Ala Cys
Thr Gly Cys Tyr Cys Cys Glu Leu Cys Cys Gly Pro
Ala Cys Thr Gly Cys Tyr Cys Cys Glu Leu Cys Cys
Ser Pro Ala Cys Thr Gly Cys Tyr Cys Cys Glu Leu
Cys Cys Thr Pro Ala Cys Thr Gly Cys Tyr Cys Cys
Glu Leu Cys Cys Cys Pro Ala Cys Thr Gly Cys Tyr
Cys Cys Glu Leu Cys Cys Gln Pro Ala Cys Thr Gly
Cys Tyr Cys Cys Glu Leu Cys Cys Tyr Pro Ala Cys
Thr Gly Cys Tyr Cys Cys Glu Leu Cys Cys Asp Pro
Ala Cys Thr Gly Cys Tyr Cys Cys Glu Leu Cys Cys
Glu Pro Ala Cys Thr Gly Cys Tyr Cys Cys Glu Leu
Cys Cys Lys Pro Ala Cys Thr Gly Cys Tyr Cys Cys
Glu Leu Cys Cys Arg Pro Ala Cys Thr Gly Cys Tyr
Cys Cys Glu Leu Cys Cys His Pro Ala Cys Thr Gly
Cys Tyr Cys Cys Glu Tyr Cys Cys Ala Pro Ala Cys
Thr Gly Cys Tyr Cys Cys Glu Tyr Cys Cys Val Pro
Ala Cys Thr Gly Cys Tyr Cys Cys Glu Tyr Cys Cys
Leu Pro Ala Cys Thr Gly Cys Tyr Cys Cys Glu Tyr
Cys Cys Ile Pro Ala Cys Thr Gly Cys Tyr Cys Cys
Glu Tyr Cys Cys Pro Pro Ala Cys Thr Gly Cys Tyr
Cys Cys Glu Tyr Cys Cys Met Pro Ala Cys Thr Gly
Cys Tyr Cys Cys Glu Tyr Cys Cys Phe Pro Ala Cys
Thr Gly Cys Tyr Cys Cys Glu Tyr Cys Cys Trp Pro
Ala Cys Thr Gly Cys Tyr Cys Cys Glu Tyr Cys Cys
Gly Pro Ala Cys Thr Gly Cys Tyr Cys Cys Glu Tyr
Cys Cys Ser Pro Ala Cys Thr Gly Cys Tyr Cys Cys
Glu Tyr Cys Cys Thr Pro Ala Cys Thr Gly Cys Tyr
Cys Cys Glu Tyr Cys Cys Cys Pro Ala Cys Thr Gly
Cys Tyr Cys Cys Glu Tyr Cys Cys Gln Pro Ala Cys
Thr Gly Cys Tyr Cys Cys Glu Tyr Cys Cys Tyr Pro
Ala Cys Thr Gly Cys Tyr Cys Cys Glu Tyr Cys Cys
Asp Pro Ala Cys Thr Gly Cys Tyr Cys Cys Glu Tyr
Cys Cys Glu Pro Ala Cys Thr Gly Cys Tyr Cys Cys
Glu Tyr Cys Cys Lys Pro Ala Cys Thr Gly Cys Tyr
Cys Cys Glu Tyr Cys Cys Arg Pro Ala Cys Thr Gly
Cys Tyr Cys Cys Glu Tyr Cys Cys His Pro Ala Cys
Thr Gly Cys Tyr Cys Cys Glu Leu Cys Cys Ala Pro
Ala Cys Thr Gly Cys Cys Cys Glu Leu Cys Cys Val
Pro Ala Cys Thr Gly Cys Cys Cys Glu Leu Cys Cys
Leu Pro Ala Cys Thr Gly Cys Cys Cys Glu Leu Cys
Cys Ile Pro Ala Cys Thr Gly Cys Cys Cys Glu Leu
Cys Cys Pro Pro Ala Cys Thr Gly Cys Cys Cys Glu
Leu Cys Cys Met Pro Ala Cys Thr Gly Cys Cys Cys
Glu Leu Cys Cys Phe Pro Ala Cys Thr Gly Cys Cys
Cys Glu Leu Cys Cys Trp Pro Ala Cys Thr Gly Cys
Cys Cys Glu Leu Cys Cys Gly Pro Ala Cys Thr Gly
Cys Cys Cys Glu Leu Cys Cys Ser Pro Ala Cys Thr
Gly Cys Cys Cys Glu Leu Cys Cys Thr Pro Ala Cys
Thr Gly Cys Cys Cys Glu Leu Cys Cys Cys Pro Ala
Cys Thr Gly Cys Cys Cys Glu Leu Cys Cys Gln Pro
Ala Cys Thr Gly Cys Cys Cys Glu Leu Cys Cys Tyr
Pro Ala Cys Thr Gly Cys Cys Cys Glu Leu Cys Cys
Asp Pro Ala Cys Thr Gly Cys Cys Cys Glu Leu Cys
Cys Glu Pro Ala Cys Thr Gly Cys Cys Cys Glu Leu
Cys Cys Lys Pro Ala Cys Thr Gly Cys Cys Cys Glu
Leu Cys Cys Arg Pro Ala Cys Thr Gly Cys Cys Cys
Glu Leu Cys Cys His Pro Ala Cys Thr Gly Cys Cys
Cys Glu Tyr Cys Cys Ala Pro Ala Cys Thr Gly Cys
Cys Cys Glu Tyr Cys Cys Val Pro Ala Cys Thr Gly
Cys Cys Cys Glu Tyr Cys Cys Leu Pro Ala Cys Thr
Gly Cys Cys Cys Glu Tyr Cys Cys Ile Pro Ala Cys
Thr Gly Cys Cys Cys Glu Tyr Cys Cys Pro Pro Ala
Cys Thr Gly Cys Cys Cys Glu Tyr Cys Cys Met Pro
Ala Cys Thr Gly Cys Cys Cys Glu Tyr Cys Cys Phe
Pro Ala Cys Thr Gly Cys Cys Cys Glu Tyr Cys Cys
Trp Pro Ala Cys Thr Gly Cys Cys Cys Glu Tyr Cys
Cys Gly Pro Ala Cys Thr Gly Cys Cys Cys Glu Tyr
Cys Cys Ser Pro Ala Cys Thr Gly Cys Cys Cys Glu
Tyr Cys Cys Thr Pro Ala Cys Thr Gly Cys Cys Cys
Glu Tyr Cys Cys Cys Pro Ala Cys Thr Gly Cys Cys
Cys Glu Tyr Cys Cys Gln Pro Ala Cys Thr Gly Cys
Cys Cys Glu Tyr Cys Cys Tyr Pro Ala Cys Thr Gly
Cys Cys Cys GLu Tyr Cys Cys Asp Pro Ala Cys Thr
Gly Cys Cys Cys Glu Tyr Cys Cys Glu Pro Ala Cys
Thr Gly Cys Cys Cys Glu Tyr Cys Cys Lys Pro Ala
Cys Thr Gly Cys Cys Cys Glu Tyr Cys Cys Arg Pro
Ala Cys Thr Gly Cys Cys Cys Glu Tyr Cys Cys His
Pro Ala Cys Thr Gly Cys Cys Cys Glu Leu Cys Cys
Asn Pro Thr Cys Thr Gly Cys Tyr Cys Cys Glu Tyr
Cys Cys Asn Pro Thr Cys Thr Gly Cys Tyr Cys Cys
Glu Leu Cys Cys Asn Pro Thr Cys Thr Gly Cys Cys
Cys Glu Tyr Cys Cys Asn Pro Thr Cys Thr Gly Cys
Cys Cys Glu Phe Cys Cys Asn Pro Thr Cys Thr Gly
Cys Tyr Cys Cys Glu Phe Cys Cys Asn Pro Thr Cys
Thr Gly Cys Cys Cys Glu Trp Cys Cys Asn Pro Thr
Cys Thr Gly Cys Tyr Cys Cys Glu Trp Cys Cys Asn
Pro Thr Cys Thr Gly Cys Cys Cys Glu Leu Cys Cys
Asn Gly Ala Cys Thr Gly Cys Tyr Cys Cys Glu Tyr
Cys Cys Asn Gly Ala Cys Thr Gly Cys Tyr Cys Cys
Glu Leu Cys Cys Asn Gly Ala Cys Thr Gly Cys Cys
Cys Glu Tyr Cys Cys Asn Gly Ala Cys Thr Gly Cys
Cys Cys Glu Phe Cys Cys Asn Gly Ala Cys Thr Gly
Cys Tyr Cys Cys Glu Phe Cys Cys Asn Gly Ala Cys
Thr Gly Cys Cys Cys Glu Trp Cys Cys Asn Gly Ala
Cys Thr Gly Cys Tyr Cys Cys Glu Trp Cys Cys Asn
Gly Ala Cys Thr Gly Cys Cys Cys Glu Leu Cys Cys
Asn Pro Ala Cys Val Gly Cys Tyr Cys Cys Glu Tyr
Cys Cys Asn Pro Ala Cys Val Gly Cys Tyr Cys Cys
Glu Leu Cys Cys Asn Pro Ala Cys Val Gly Cys Cys
Cys Glu Tyr Cys Cys Asn Pro Ala Cys Val Gly Cys
Cys Cys Glu Phe Cys Cys Asn Pro Ala Cys Val Gly
Cys Tyr Cys Cys Glu Phe Cys Cys Asn Pro Ala Cys
Val Gly Cys Cys Cys Glu Trp Cys Cys Asn Pro Ala
Cys Val Gly Cys Tyr Cys Cys Glu Trp Cys Cys Asn
Pro Ala Cys Val Gly Cys Cys Cys Glu Leu Cys Cys
Asn Pro Ala Cys Gly Gly Cys Tyr Cys Cys Glu Tyr
Cys Cys Asn Pro Ala Cys Gly Gly Cys Tyr Cys Cys
Glu Leu Cys Cys Asn Pro Ala Cys Gly Gly Cys Cys
Cys Glu Tyr Cys Cys Asn Pro Ala Cys Gly Gly Cys
Cys Cys Glu Phe Cys Cys Asn Pro Ala Cys Gly Gly
Cys Tyr Cys Cys Glu Phe Cys Cys Asn Pro Ala Cys
Gly Gly Cys Cys Cys Glu Trp Cys Cys Asn Pro Ala
Cys Gly Gly Cys Tyr Cys Cys Glu Trp Cys Cys Asn
Pro Ala Cys Gly Gly Cys Cys Cys Glu Leu Cys Cys
Asn Pro Ala Cys Thr Ala Cys Tyr Cys Cys Glu Tyr
Cys Cys Asn Pro Ala Cys Thr Ala Cys Tyr Cys Cys
Glu Leu Cys Cys Asn Pro Ala Cys Thr Ala Cys Cys
Cys Glu Tyr Cys Cys Asn Pro Ala Cys Thr Ala Cys
Cys Cys Glu Trp Cys Cys Asn Pro Ala Cys Thr Ala
Cys Tyr Cys Cys Glu Trp Cys Cys Asn Pro Ala Cys
Thr Ala Cys Cys Cys Glu Phe Cys Cys Asn Pro Ala
Cys Thr Ala Cys Tyr Cys Cys Glu Phe Cys Cys Asn
Pro Ala Cys Thr Ala Cys Cys Cys Glu Leu Cys Cys
Asn Pro Ala Cys Thr Gly Cys Ala Cys Cys Glu Leu
Cys Cys Asn Pro Ala Cys Thr Gly Cys Val Cys Cys
Glu Leu Cys Cys Asn Pro Ala Cys Thr Gly Cys Leu
Cys Cys Glu Leu Cys Cys Asn Pro Ala Cys Thr Gly
Cys Ile Cys Cys Glu Leu Cys Cys Asn Pro Ala Cys
Thr Gly Cys Pro Cys Cys Glu Leu Cys Cys Asn Pro
Ala Cys Thr Gly Cys Met Cys Cys Glu Leu Cys Cys
Asn Pro Ala Cys Thr Gly Cys Phe Cys Cys Glu Leu
Cys Cys Asn Pro Ala Cys Thr Gly Cys Trp Cys Cys
Glu Leu Cys Cys Asn Pro Ala Cys Thr Gly Cys Gly
Cys Cys Glu Leu Cys Cys Asn Pro Ala Cys Thr Gly
Cys Ser Cys Cys Glu Leu Cys Cys Asn Pro Ala Cys
Thr Gly Cys Thr Cys Cys Glu Leu Cys Cys Asn Pro
Ala Cys Thr Gly Cys Cys Cys Cys Glu Leu Cys Cys
Asn Pro Ala Cys Thr Gly Cys Asn Cys Cys Glu Leu
Cys Cys Asn Pro Ala Cys Thr Gly Cys Gln Cys Cys
Glu Leu Cys Cys Asn Pro Ala Cys Thr Gly Cys Asp
Cys Cys Glu Leu Cys Cys Asn Pro Ala Cys Thr Gly
Cys Gln Cys Cys Glu Leu Cys Cys Asn Pro Ala Cys
Thr Gly Cys Lys Cys Cys Glu Leu Cys Cys Asn Pro
Ala Cys Thr Gly Cys Arg Cys Cys Glu Leu Cys Cys
Asn Pro Ala Cys Thr Gly Cys His Cys Cys Glu Tyr
Cys Cys Asn Pro Ala Cys Thr Gly Cys Ala Cys Cys
Glu Tyr Cys Cys Asn Pro Ala Cys Thr Gly Cys Val
Cys Cys Glu Tyr Cys Cys Asn Pro Ala Cys Thr Gly
Cys Leu Cys Cys Glu Tyr Cys Cys Asn Pro Ala Cys
Thr Gly Cys Ile Cys Cys Glu Tyr Cys Cys Asn Pro
Ala Cys Thr Gly Cys Pro Cys Cys Glu Tyr Cys Cys
Asn Pro Ala Cys Thr Gly Cys Met Cys Cys Glu Tyr
Cys Cys Asn Pro Ala Cys Thr Gly Cys Phe Cys Cys
Glu Tyr Cys Cys Asn Pro Ala Cys Thr Gly Cys Trp
Cys Cys Glu Tyr Cys Cys Asn Pro Ala Cys Thr Gly
Cys Gly Cys Cys Glu Tyr Cys Cys Asn Pro Ala Cys
Thr Gly Cys Ser Cys Cys Glu Tyr Cys Cys Asn Pro
Ala Cys Thr Gly Cys Thr Cys Cys Glu Tyr Cys Cys
Asn Pro Ala Cys Thr Gly Cys Cys Cys Cys Glu Tyr
Cys Cys Asn Pro Ala Cys Thr Gly Cys Asn Cys Cys
Glu Tyr Cys Cys Asn Pro Ala Cys Thr Gly Cys Gln
Cys Cys Glu Tyr Cys Cys Asn Pro Ala Cys Thr Gly
Cys Asp Cys Cys Glu Tyr Cys Cys Asn Pro Ala Cys
Thr Gly Cys Glu Cys Cys Glu Tyr Cys Cys Asn Pro
Ala Cys Thr Gly Cys Lys Cys Cys Glu Tyr Cys Cys
Asn Pro Ala Cys Thr Gly Cys Arg Cys Cys Glu Tyr
Cys Cys Asn Pro Ala Cys Thr Gly Cys His Cys Cys
Ala Leu Cys Cys Asn Pro Ala Cys Thr Gly Cys Tyr
Cys Cys Val Leu Cys Cys Asn Pro Ala Cys Thr Gly
Cys Tyr Cys Cys Leu Leu Cys Cys Asn Pro Ala Cys
Thr Gly Cys Tyr Cys Cys Ile Leu Cys Cys Asn Pro
Ala Cys Thr Gly Cys Tyr Cys Cys Met Leu Cys Cys
Asn Pro Ala Cys Thr Gly Cys Tyr Cys Cys Phe Leu
Cys Cys Asn Pro Ala Cys Thr Gly Cys Tyr Cys Cys
Trp Leu Cys Cys Asn Pro Ala Cys Thr Gly Cys Tyr
Cys Cys Gly Leu Cys Cys Asn Pro Ala Cys Thr Gly
Cys Tyr Cys Cys Ser Leu Cys Cys Asn Pro Ala Cys
Thr Gly Cys Tyr Cys Cys Thr Leu Cys Cys Asn Pro
Ala Cys Thr Gly Cys Tyr Cys Cys Cys Leu Cys Cys
Asn Pro Ala Cys Thr Gly Cys Tyr Cys Cys Asn Leu
Cys Cys Asn Pro Ala Cys Thr Gly Cys Tyr Cys Cys
Gln Leu Cys Cys Asn Pro Ala Cys Thr Gly Cys Tyr
Cys Cys Tyr Leu Cys Cys Asn Pro Ala Cys Thr Gly
Cys Tyr Cys Cys Asp Leu Cys Cys Asn Pro Ala Cys
Thr Gly Cys Tyr Cys Cys Lys Leu Cys Cys Asn Pro
Ala Cys Thr Gly Cys Tyr Cys Cys Arg Leu Cys Cys
Asn Pro Ala Cys Thr Gly Cys Tyr Cys Cys His Leu
Cys Cys Asn Pro Ala Cys Thr Gly Cys Tyr Cys Cys
Ala Leu Cys Cys Asn Pro Ala Cys Thr Gly Cys Cys
Cys Val Leu Cys Cys Asn Pro Ala Cys Thr Gly Cys
Cys Cys Leu Leu Cys Cys Asn Pro Ala Cys Thr Gly
Cys Cys Cys Ile Leu Cys Cys Asn Pro Ala Cys Thr
Gly Cys Cys Cys Met Leu Cys Cys Asn Pro Ala Cys
Thr Gly Cys Cys Cys Phe Leu Cys Cys Asn Pro Ala
Cys Thr Gly Cys Cys Cys Trp Leu Cys Cys Asn Pro
Ala Cys Thr Gly Cys Cys Cys Gly Leu Cys Cys Asn
Pro Ala Cys Thr Gly Cys Cys Cys Ser Leu Cys Cys
Asn Pro Ala Cys Thr Gly Cys Cys Cys Thr Leu Cys
Cys Asn Pro Ala Cys Thr Gly Cys Cys Cys Cys Leu
Cys Cys Asn Pro Ala Cys Thr Gly Cys Cys Cys Asn
Leu Cys Cys Asn Pro Ala Cys Thr Gly Cys Cys Cys
Gln Leu Cys Cys Asn Pro Ala Cys Thr Gly Cys Cys
Cys Tyr Leu Cys Cys Asn Pro Ala Cys Thr Gly Cys
Cys Cys Asp Leu Cys Cys Asn Pro Ala Cys Thr Gly
Cys Cys Cys Lys Leu Cys Cys Asn Pro Ala Cys Thr
Gly Cys Cys Cys Arg Leu Cys Cys Asn Pro Ala Cys
Thr Gly Cys Cys Cys His Leu Cys Cys Asn Pro Ala
Cys Thr Gly Cys Cys Cys Ala Tyr Cys Cys Asn Pro
Ala Cys Thr Gly Cys Tyr Cys Cys Val Tyr Cys Cys
Asn Pro Ala Cys Thr Gly Cys Tyr Cys Cys Leu Tyr
Cys Cys Asn Pro Ala Cys Thr Gly Cys Tyr Cys Cys
Ile Tyr Cys Cys Asn Pro Ala Cys Thr Gly Cys Tyr
Cys Cys Met Tyr Cys Cys Asn Pro Ala Cys Thr Gly
Cys Tyr Cys Cys Phe Tyr Cys Cys Asn Pro Ala Cys
Thr Gly Cys Tyr Cys Cys Trp Tyr Cys Cys Asn Pro
Ala Cys Thr Gly Cys Tyr Cys Cys Gly Tyr Cys Cys
Asn Pro Ala Cys Thr Gly Cys Tyr Cys Cys Ser Tyr
Cys Cys Asn Pro Ala Cys Thr Gly Cys Tyr Cys Cys
Thr Tyr Cys Cys Asn Pro Ala Cys Thr Gly Cys Tyr
Cys Cys Cys Tyr Cys Cys Asn Pro Ala Cys Thr Gly
Cys Tyr Cys Cys Asn Tyr Cys Cys Asn Pro Ala Cys
Thr Gly Cys Tyr Cys Cys Gln Tyr Cys Cys Asn Pro
Ala Cys Thr Gly Cys Tyr Cys Cys Tyr Tyr Cys Cys
Asn Pro Ala Cys Thr Gly Cys Tyr Cys Cys Asp Tyr
Cys Cys Asn Pro Ala Cys Thr Gly Cys Tyr Cys Cys
Lys Tyr Cys Cys Asn Pro Ala Cys Thr Gly Cys Tyr
Cys Cys Arg Tyr Cys Cys Asn Pro Ala Cys Thr Gly
Cys Tyr Cys Cys His Tyr Cys Cys Asn Pro Ala Cys
Thr Gly Cys Tyr Cys Cys Ala Tyr Cys Cys Asn Pro
Ala Cys Thr Gly Cys Cys Cys Val Tyr Cys Cys Asn
Pro Ala Cys Thr Gly Cys Cys Cys Leu Tyr Cys Cys
Asn Pro Ala Cys Thr Gly Cys Cys Cys Ile Tyr Cys
Cys Asn Pro Ala Cys Thr Gly Cys Cys Cys Met Tyr
Cys Cys Asn Pro Ala Cys Thr Gly Cys Cys Cys Phe
Tyr Cys Cys Asn Pro Ala Cys Thr Gly Cys Cys Cys
Trp Tyr Cys Cys Asn Pro Ala Cys Thr Gly Cys Cys
Cys Gly Tyr Cys Cys Asn Pro Ala Cys Thr Gly Cys
Cys Cys Ser Tyr Cys Cys Asn Pro Ala Cys Thr Gly
Cys Cys Cys Thr Tyr Cys Cys Asn Pro Ala Cys Thr
Gly Cys Cys Cys Cys Tyr Cys Cys Asn Pro Ala Cys
Thr Gly Cys Cys Cys Asn Tyr Cys Cys Asn Pro Ala
Cys Thr Gly Cys Cys Cys Gln Tyr Cys Cys Asn Pro
Ala Cys Thr Gly Cys Cys Cys Tyr Tyr Cys Cys Asn
Pro Ala Cys Thr Gly Cys Cys Cys Asp Tyr Cys Cys
Asn Pro Ala Cys Thr Gly Cys Cys Cys Lys Tyr Cys
Cys Asn Pro Ala Cys Thr Gly Cys Cys Cys Arg Tyr
Cys Cys Asn Pro Ala Cys Thr Gly Cys Cys Cys His
Tyr Cys Cys Asn Pro Ala Cys Thr Gly Cys Cys Cys
Glu Phe Cys Cys Ala Pro Ala Cys Thr Gly Cys Tyr
Cys Cys Glu Phe Cys Cys Val Pro Ala Cys Thr Gly
Cys Tyr Cys Cys Glu Phe Cys Cys Leu Pro Ala Cys
Thr Gly Cys Tyr Cys Cys Glu Phe Cys Cys Ile Pro
Ala Cys Thr Gly Cys Tyr Cys Cys Glu Phe Cys Cys
Pro Pro Ala Cys Thr Gly Cys Tyr Cys Cys Glu Phe
Cys Cys Met Pro Ala Cys Thr Gly Cys Tyr Cys Cys
Glu Phe Cys Cys Phe Pro Ala Cys Thr Gly Cys Tyr
Cys Cys Glu Phe Cys Cys Trp Pro Ala Cys Thr Gly
Cys Tyr Cys Cys Glu Phe Cys Cys Gly Pro Ala Cys
Thr Gly Cys Tyr Cys Cys Glu Phe Cys Cys Ser Pro
Ala Cys Thr Gly Cys Tyr Cys Cys Glu Phe Cys Cys
Thr Pro Ala Cys Thr Gly Cys Tyr Cys Cys Glu Phe
Cys Cys Cys Pro Ala Cys Thr Gly Cys Tyr Cys Cys
Glu Phe Cys Cys Gln Pro Ala Cys Thr Gly Cys Tyr
Cys Cys Glu Phe Cys Cys Tyr Pro Ala Cys Thr Gly
Cys Tyr Cys Cys Glu Phe Cys Cys Asp Pro Ala Cys
Thr Gly Cys Tyr Cys Cys Glu Phe Cys Cys Glu Pro
Ala Cys Thr Gly Cys Tyr Cys Cys Glu Phe Cys Cys
Lys Pro Ala Cys Thr Gly Cys Tyr Cys Cys Glu Phe
Cys Cys Arg Pro Ala Cys Thr Gly Cys Tyr Cys Cys
Glu Phe Cys Cys His Pro Ala Cys Thr Gly Cys Tyr
Cys Cys Glu Phe Cys Cys Ala Pro Ala Cys Thr Gly
Cys Cys Cys Glu Phe Cys Cys Val Pro Ala Cys Thr
Gly Cys Cys Cys Glu Phe Cys Cys Leu Pro Ala Cys
Thr Gly Cys Cys Cys Glu Phe Cys Cys Ile Pro Ala
Cys Thr Gly Cys Cys Cys Glu Phe Cys Cys Pro Pro
Ala Cys Thr Gly Cys Cys Cys Glu Phe Cys Cys Met
Pro Ala Cys Thr Gly Cys Cys Cys Glu Phe Cys Cys
Phe Pro Ala Cys Thr Gly Cys Cys Cys Glu Phe Cys
Cys Trp Pro Ala Cys Thr Gly Cys Cys Cys Glu Phe
Cys Cys Gly Pro Ala Cys Thr Gly Cys Cys Cys Glu
Phe Cys Cys Ser Pro Ala Cys Thr Gly Cys Cys Cys
Glu Phe Cys Cys Thr Pro Ala Cys Thr Gly Cys Cys
Cys Glu Phe Cys Cys Cys Pro Ala Cys Thr Gly Cys
Cys Cys Glu Phe Cys Cys Gln Pro Ala Cys Thr Gly
Cys Cys Cys Glu Phe Cys Cys Tyr Pro Ala Cys Thr
Gly Cys Cys Cys Glu Phe Cys Cys Asp Pro Ala Cys
Thr Gly Cys Cys Cys Glu Phe Cys Cys Glu Pro Ala
Cys Thr Gly Cys Cys Cys Glu Phe Cys Cys Lys Pro
Ala Cys Thr Gly Cys Cys Cys Glu Phe Cys Cys Arg
Pro Ala Cys Thr Gly Cys Cys Cys Glu Phe Cys Cys
His Pro Ala Cys Thr Gly Cys Cys Cys Glu Trp Cys
Cys Ala Pro Ala Cys Thr Gly Cys Tyr Cys Cys Glu
Trp Cys Cys Val Pro Ala Cys Thr Gly Cys Tyr Cys
Cys Glu Trp Cys Cys Leu Pro Ala Cys Thr Gly Cys
Tyr Cys Cys Glu Trp Cys Cys Ile Pro Ala Cys Thr
Gly Cys Tyr Cys Cys Glu Trp Cys Cys Pro Pro Ala
Cys Thr Gly Cys Tyr Cys Cys Glu Trp Cys Cys Met
Pro Ala Cys Thr Gly Cys Tyr Cys Cys Glu Trp Cys
Cys Phe Pro Ala Cys Thr Gly Cys Tyr Cys Cys Glu
Trp Cys Cys Trp Pro Ala Cys Thr Gly Cys Tyr Cys
Cys Glu Trp Cys Cys Gly Pro Ala Cys Thr Gly Cys
Tyr Cys Cys Glu Trp Cys Cys Ser Pro Ala Cys Thr
Gly Cys Tyr Cys Cys Glu Trp Cys Cys Thr Pro Ala
Cys Thr Gly Cys Tyr Cys Cys Glu Trp Cys Cys Cys
Pro Ala Cys Thr Gly Cys Tyr Cys Cys Glu Trp Cys
Cys Gln Pro Ala Cys Thr Gly Cys Tyr Cys Cys Glu
Trp Cys Cys Tyr Pro Ala Cys Thr Gly Cys Tyr Cys
Cys Glu Trp Cys Cys Asp Pro Ala Cys Thr Gly Cys
Tyr Cys Cys Glu Trp Cys Cys Glu Pro Ala Cys Thr
Gly Cys Tyr Cys Cys Glu Trp Cys Cys Lys Pro Ala
Cys Thr Gly Cys Tyr Cys Cys Glu Trp Cys Cys Arg
Pro Ala Cys Thr Gly Cys Tyr Cys Cys Glu Trp Cys
Cys His Pro Ala Cys Thr Gly Cys Tyr Cys Cys Glu
Trp Cys Cys Ala Pro Ala Cys Thr Gly Cys Cys Cys
Glu Trp Cys Cys Val Pro Ala Cys Thr Gly Cys Cys
Cys Glu Trp Cys Cys Leu Pro Ala Cys Thr Gly Cys
Cys Cys Glu Trp Cys Cys Ile Pro Ala Cys Thr Gly
Cys Cys Cys Glu Trp Cys Cys Pro Pro Ala Cys Thr
Gly Cys Cys Cys Glu Trp Cys Cys Met Pro Ala Cys
Thr Gly Cys Cys Cys Glu Trp Cys Cys Phe Pro Ala
Cys Thr Gly Cys Cys Cys Glu Trp Cys Cys Trp Pro
Ala Cys Thr Gly Cys Cys Cys Glu Trp Cys Cys Gly
Pro Ala Cys Thr Gly Cys Cys Cys Glu Trp Cys Cys
Ser Pro Ala Cys Thr Gly Cys Cys Cys Glu Trp Cys
Cys Thr Pro Ala Cys Thr Gly Cys Cys Cys Glu Trp
Cys Cys Cys Pro Ala Cys Thr Gly Cys Cys Cys Glu
Trp Cys Cys Gln Pro Ala Cys Thr Gly Cys Cys Cys
Glu Trp Cys Cys Tyr Pro Ala Cys Thr Gly Cys Cys
Cys Glu Trp Cys Cys Asp Pro Ala Cys Thr Gly Cys
Cys Cys Glu Trp Cys Cys Glu Pro Ala Cys Thr Gly
Cys Cys Cys Glu Trp Cys Cys Lys Pro Ala Cys Thr
Gly Cys Cys Cys Glu Trp Cys Cys Arg Pro Ala Cys
Thr Gly Cys Cys Cys Glu Trp Cys Cys His Pro Ala
Cys Thr Gly Cys Cys Cys Glu Trp Cys Cys Asn Pro
Ala Cys Thr Gly Cys Ala Cys Cys Glu Trp Cys Cys
Asn Pro Ala Cys Thr Gly Cys Val Cys Cys Glu Trp
Cys Cys Asn Pro Ala Cys Thr Gly Cys Leu Cys Cys
Glu Trp Cys Cys Asn Pro Ala Cys Thr Gly Cys Ile
Cys Cys Glu Trp Cys Cys Asn Pro Ala Cys Thr Gly
Cys Pro Cys Cys Glu Trp Cys Cys Asn Pro Ala Cys
Thr Gly Cys Met Cys Cys Glu Trp Cys Cys Asn Pro
Ala Cys Thr Gly Cys Phe Cys Cys Glu Trp Cys Cys
Asn Pro Ala Cys Thr Gly Cys Trp Cys Cys Glu Trp
Cys Cys Asn Pro Ala Cys Thr Gly Cys Gly Cys Cys
Glu Trp Cys Cys Asn Pro Ala Cys Thr Gly Cys Ser
Cys Cys Glu Trp Cys Cys Asn Pro Ala Cys Thr Gly
Cys Thr Cys Cys Glu Trp Cys Cys Asn Pro Ala Cys
Thr Gly Cys Cys Cys Cys Glu Trp Cys Cys Asn Pro
Ala Cys Thr Gly Cys Asn Cys Cys Glu Trp Cys Cys
Asn Pro Ala Cys Thr Gly Cys Gln Cys Cys Glu Trp
Cys Cys Asn Pro Ala Cys Thr Gly Cys Asp Cys Cys
Glu Trp Cys Cys Asn Pro Ala Cys Thr Gly Cys Glu
Cys Cys Glu Trp Cys Cys Asn Pro Ala Cys Thr Gly
Cys Lys Cys Cys Glu Trp Cys Cys Asn Pro Ala Cys
Thr Gly Cys Arg Cys Cys Glu Trp Cys Cys Asn Pro
Ala Cys Thr Gly Cys His Cys Cys Glu Phe Cys Cys
Asn Pro Ala Cys Thr Gly Cys Ala Cys Cys Glu Phe
Cys Cys Asn Pro Ala Cys Thr Gly Cys Val Cys Cys
Glu Phe Cys Cys Asn Pro Ala Cys Thr Gly Cys Leu
Cys Cys Glu Phe Cys Cys Asn Pro Ala Cys Thr Gly
Cys Ile Cys Cys Glu Phe Cys Cys Asn Pro Ala Cys
Thr Gly Cys Pro Cys Cys Glu Phe Cys Cys Asn Pro
Ala Cys Thr Gly Cys Met Cys Cys Glu Phe Cys Cys
Asn Pro Ala Cys Thr Gly Cys Phe Cys Cys Glu Phe
Cys Cys Asn Pro Ala Cys Thr Gly Cys Trp Cys Cys
Glu Phe Cys Cys Asn Pro Ala Cys Thr Gly Cys Gly
Cys Cys Glu Phe Cys Cys Asn Pro Ala Cys Thr Gly
Cys Ser Cys Cys Glu Phe Cys Cys Asn Pro Ala Cys
Thr Gly Cys Thr Cys Cys Glu Phe Cys Cys Asn Pro
Ala Cys Thr Gly Cys Cys Cys Cys Glu Phe Cys Cys
Asn Pro Ala Cys Thr Gly Cys Asn Cys Cys Glu Phe
Cys Cys Asn Pro Ala Cys Thr Gly Cys Gln Cys Cys
Glu Phe Cys Cys Asn Pro Ala Cys Thr Gly Cys Asp
Cys Cys Glu Phe Cys Cys Asn Pro Ala Cys Thr Gly
Cys Glu Cys Cys Glu Phe Cys Cys Asn Pro Ala Cys
Thr Gly Cys Lys Cys Cys Glu Phe Cys Cys Asn Pro
Ala Cys Thr Gly Cys Arg Cys Cys Glu Phe Cys Cys
Asn Pro Ala Cys Thr Gly Cys His Cys Cys Ala Phe
Cys Cys Asn Pro Ala Cys Thr Gly Cys Tyr Cys Cys
Val Phe Cys Cys Asn Pro Ala Cys Thr Gly Cys Tyr
Cys Cys Leu Phe Cys Cys Asn Pro Ala Cys Thr Gly
Cys Tyr Cys Cys Ile Phe Cys Cys Asn Pro Ala Cys
Thr Gly Cys Tyr Cys Cys Met Phe Cys Cys Asn Pro
Ala Cys Thr Gly Cys Tyr Cys Cys Phe Phe Cys Cys
Asn Pro Ala Cys Thr Gly Cys Tyr Cys Cys Trp Phe
Cys Cys Asn Pro Ala Cys Thr Gly Cys Tyr Cys Cys
Gly Phe Cys Cys Asn Pro Ala Cys Thr Gly Cys Tyr
Cys Cys Ser Phe Cys Cys Asn Pro Ala Cys Thr Gly
Cys Tyr Cys Cys Thr Phe Cys Cys Asn Pro Ala Cys
Thr Gly Cys Tyr Cys Cys Cys Phe Cys Cys Asn Pro
Ala Cys Thr Gly Cys Tyr Cys Cys Asn Phe Cys Cys
Asn Pro Ala Cys Thr Gly Cys Tyr Cys Cys Glu Phe
Cys Cys Asn Pro Ala Cys Thr Gly Cys Tyr Cys Cys
Tyr Phe Cys Cys Asn Pro Ala Cys Thr Gly Cys Tyr
Cys Cys Asp Phe Cys Cys Asn Pro Ala Cys Thr Gly
Cys Tyr Cys Cys Lys Phe Cys Cys Asn Pro Ala Cys
Thr Gly Cys Tyr Cys Cys Arg Phe Cys Cys Asn Pro
Ala Cys Thr Gly Cys Tyr Cys Cys His Phe Cys Cys
Asn Pro Ala Cys Thr Gly Cys Tyr Cys Cys Ala Phe
Cys Cys Asn Pro Ala Cys Thr Gly Cys Cys Cys Val
Phe Cys Cys Asn Pro Ala Cys Thr Gly Cys Cys Cys
Leu Phe Cys Cys Asn Pro Ala Cys Thr Gly Cys Cys
Cys Ile Phe Cys Cys Asn Pro Ala Cys Thr Gly Cys
Cys Cys Met Phe Cys Cys Asn Pro Ala Cys Thr Gly
Cys Cys Cys Phe Phe Cys Cys Asn Pro Ala Cys Thr
Gly Cys Cys Cys Trp Phe Cys Cys Asn Pro Ala Cys
Thr Gly Cys Cys Cys Gly Phe Cys Cys Asn Pro Ala
Cys Thr Gly Cys Cys Cys Ser Phe Cys Cys Asn Pro
Ala Cys Thr Gly Cys Cys Cys Thr Phe Cys Cys Asn
Pro Ala Cys Thr Gly Cys Cys Cys Cys Phe Cys Cys
Asn Pro Ala Cys Thr Gly Cys Cys Cys Asn Phe Cys
Cys Asn Pro Ala Cys Thr Gly Cys Cys Cys Gln Phe
Cys Cys Asn Pro Ala Cys Thr Gly Cys Cys Cys Tyr
Phe Cys Cys Asn Pro Ala Cys Thr Gly Cys Cys Cys
Asp Phe Cys Cys Asn Pro Ala Cys Thr Gly Cys Cys
Cys Lys Phe Cys Cys Asn Pro Ala Cys Thr Gly Cys
Cys Cys Arg Phe Cys Cys Asn Pro Ala Cys Thr Gly
Cys Cys Cys His Phe Cys Cys Asn Pro Ala Cys Thr
Gly Cys Cys Cys Ala Trp Cys Cys Asn Pro Ala Cys
Thr Gly Cys Tyr Cys Cys Val Trp Cys Cys Asn Pro
Ala Cys Thr Gly Cys Tyr Cys Cys Leu Trp Cys Cys
Asn Pro Ala Cys Thr Gly Cys Tyr Cys Cys Ile Trp
Cys Cys Asn Pro Ala Cys Thr Gly Cys Tyr Cys Cys
Met Trp Cys Cys Asn Pro Ala Cys Thr Gly Cys Tyr
Cys Cys Phe Trp Cys Cys Asn Pro Ala Cys Thr Gly
Cys Tyr Cys Cys Trp Trp Cys Cys Asn Pro Ala Cys
Thr Gly Cys Tyr Cys Cys Gly Trp Cys Cys Asn Pro
Ala Cys Thr Gly Cys Tyr Cys Cys Ser Trp Cys Cys
Asn Pro Ala Cys Thr Gly Cys Tyr Cys Cys Thr Trp
Cys Cys Asn Pro Ala Cys Thr Gly Cys Tyr Cys Cys
Cys Trp Cys Cys Asn Pro Ala Cys Thr Gly Cys Tyr
Cys Cys Asn Trp Cys Cys Asn Pro Ala Cys Thr Gly
Cys Tyr Cys Cys Gln Trp Cys Cys Asn Pro Ala Cys
Thr Gly Cys Tyr Cys Cys Tyr Trp Cys Cys Asn Pro
Ala Cys Thr Gly Cys Tyr Cys Cys Asp Trp Cys Cys
Asn Pro Ala Cys Thr Gly Cys Tyr Cys Cys Lys Trp
Cys Cys Asn Pro Ala Cys Thr Gly Cys Tyr Cys Cys
Arg Trp Cys Cys Asn Pro Ala Cys Thr Gly Cys Tyr
Cys Cys His Trp Cys Cys Asn Pro Ala Cys Thr Gly
Cys Tyr Cys Cys Ala Trp Cys Cys Asn Pro Ala Cys
Thr Gly Cys Cys Cys Val Trp Cys Cys Asn Pro Ala
Cys Thr Gly Cys Cys Cys Leu Trp Cys Cys Asn Pro
Ala Cys Thr Gly Cys Cys Cys Ile Trp Cys Cys Asn
Pro Ala Cys Thr Gly Cys Cys Cys Met Trp Cys Cys
Asn Pro Ala Cys Thr Gly Cys Cys Cys Phe Trp Cys
Cys Asn Pro Ala Cys Thr Gly Cys Cys Cys Trp Trp
Cys Cys Asn Pro Ala Cys Thr Gly Cys Cys Cys Gly
Trp Cys Cys Asn Pro Ala Cys Thr Gly Cys Cys Cys
Ser Trp Cys Cys Asn Pro Ala Cys Thr Gly Cys Cys
Cys Thr Trp Cys Cys Asn Pro Ala Cys Thr Gly Cys
Cys Cys Cys Trp Cys Cys Asn Pro Ala Cys Thr Gly
Cys Cys Cys Asn Trp Cys Cys Asn Pro Ala Cys Thr
Gly Cys Cys Cys Gln Trp Cys Cys Asn Pro Ala Cys
Thr Gly Cys Cys Cys Tyr Trp Cys Cys Asn Pro Ala
Cys Thr Gly Cys Cys Cys Asp Trp Cys Cys Asn Pro
Ala Cys Thr Gly Cys Cys Cys Lys Trp Cys Cys Asn
Pro Ala Cys Thr Gly Cys Cys Cys Arg Trp Cys Cys
Asn Pro Ala Cys Thr Gly Cys Cys Cys His Trp Cys
Cys Asn Pro Ala Cys Thr Gly Cys

[0107] Additional useful peptides include:

Cys Glu Leu Cys Ile Asn Val Ala Cys Thr Gly Cys
Cys Glu Leu Cys Val Asn Val Ala Cys Thr Gly Cys
Cys Ala Glu Leu Cys Cys Asn Pro Ala Cys Cys Cys
Gly Leu Cys Cys Asn Pro Ala Cys Ala Gly Cys Cys
Cys Gly Leu Cys Cys Tyr Pro Ala Cys Ala Gly Cys
Cys Glu Leu Cys Cys Asn Pro Ala Cys Ala Gly Cys
Cys Cys Asp Val Cys Cys Tyr Pro Ala Cys Thr Gly
Cys Cys Cys Glu Leu Cys Cys Asn Pro Ala Cys Ala
Gly Cys Cys Cys Glu Leu Cys Cys Tyr Pro Ala Cys
Ala Gly Cys Cys Cys Glu Leu Cys Cys Asn Pro Ala
Cys Thr Gly Cys Cys Cys Glu Leu Cys Cys Tyr Pro
Ala Cys Thr Gly Cys Cys Cys Glu Leu Cys Cys Asn
Pro Gly Cys Thr Gly Cys Cys Cys Glu Ala Cys Cys
Asn Pro Ala Cys Thr Gly Cys Cys Cys Glu Lys Cys
Cys Asn Pro Ala Cys Thr Gly Cys Cys Cys Glu Leu
Cys Cys Asn Pro Ala Cys Thr Ala Cys Cys Cys Pro
Leu Cys Cys Asn Pro Ala Cys Thr Gly Cys Ala Cys
Glu Leu Cys Ala Asn Pro Ala Cys Thr Gly Cys Cys
Cys Glu Leu Ala Cys Asn Pro Ala Cys Thr Gly Ala
Cys Glu Leu Cys Ala Asn Pro Ala Cys Thr Gly Cys
Cys Cys Glu Leu Ala Cys Asn Pro Ala Cys Cys Cys
Asp Val Cys Cys Asn Pro Ala Cys Ala Gly Cys Cys
Cys Asp Val Cys Cys Asn Pro Ala Cys Thr Gly Cys
Cys Cys Asp Val Cys Cys Asn Pro Ala Cys Ala Gly
Cys Tyr Cys Cys Asp Val Cys Cys Asn Pro Ala Cys
Thr Gly Cys Tyr Cys Cys Glu Leu Cys Cys Tyr Pro
Ala Cys Ala Gly Cys Cys Cys Ile Cys Cys Asn Pro
Ala Cys Phe Gly Cys Cys Cys Asn Tyr Cys Cys Ser
Pro Cys Gly Cys

[0108] Also useful are the following peptides wherein Xaa represents any of the 20 naturally occurring amino acids

Cys Cys Xaa Xaa Cys Cys Xaa Pro Ala Cys Xaa Gly
Cys Cys Cys Ile Xaa Cys Cys Asn Pro Ala Cys Phe
Gly Cys Cys Cys Asn Tyr Cys Cys Ser Pro Xaa Cys
Xaa Gly Cys

[0109] The invention also features deletion variants of any of the peptides described herein in which one, two, three or four amino acids (or non-natural amino acids or natural or non-natural amino acid analogs), other than a Cys (or an amino acid substituted for Cys, e.g, an amino acid capable of forming a covalent bond to another amino acid), are deleted. Where two (or more) amino acids are deleted and the peptide comprises the sequence: Cysₐ Cys_{b} Xaa Xaa Cys_{c} Cys_{d} Xaa Xaa Xaa Cysₑ Xaa Xaa Cys_{f}, in some embodiments two or more deletions can be located between Cys_{b} and Cys_{c} and/or between Cys_{d} and Cysₑ and/or between Cysₑ and Cys_{f}. However, in other embodiments there is at most one deletion between each of Cys_{b} and Cys_{c} or between Cys_{d} and Cysₑ or between Cysₑ and Cys_{f}. Thus, the invention includes any of the peptides described herein comprising the sequence Cysₐ Cys_{b} Xaa Xaa Cys_{c} Cys_{d} Xaa Xaa Xaa Cysₑ Xaa Xaa Cys_{f} wherein: a) one amino acid between Cys_{b} and Cys_{c} is deleted; b) one amino acid between Cys_{d} and Cysₑ is deleted; c) one amino acid between Cysₑ and Cys_{f} is deleted; d) one amino acid between Cys_{b} and Cys_{c} is deleted and one amino acid between Cys_{d} and Cysₑ is deleted; e) one amino acid between Cys_{d} and Cysₑ is deleted and one amino acid between Cysₑ and Cys_{f} is deleted; f) one amino acid between Cys_{b} and Cys_{c} is deleted and one amino acid between Cysₑ and Cys_{f} is deleted or g) one amino acid between Cys_{b} and Cys_{c} is deleted, one amino acid between Cys_{d} and Cysₑ is deleted and one amino acid between Cysₑ and Cys_{f} is deleted. In certain embodiments, the various deletion variants are peptides that bind to and/or activate the GC-C receptor. In various embodiments, the various deletion variants are peptides that increase cGMP levels.

[0110] Deletion variants of Cys Cys Glu Tyr Cys Cys Asn Pro Ala Cys Thr Gly Cys Tyr (SEQ ID NO:3) include the peptides listed in FIG. 11. In these deletion variants, any of the amino acids can be deleted and there can be one, two, three or four amino acids deleted other than Cys.

[0111] The invention also features insertion variants of any of the peptides described herein in which one, two, three or four amino acids (e.g., Gly or Ala) are inserted before or after any amino acid in the peptide. In some embodiments no more than one amino acid is inserted between two Cys. For example, where two or more amino acids are inserted and the peptide comprises the sequence Cysₐ Cys_{b} Xaa Xaa Cys_{c} Cys_{d} Xaa Xaa Xaa Cysₑ Xaa Xaa Cys_{f}, in some embodiments two or more insertions can be located between Cys_{b} and Cys_{c} or between Cys_{d} and Cysₑ or between Cysₑ and Cys_{f}. However, in other embodiments no more than one insertion is located between Cys_{b} and Cyst or between Cys_{d} and Cysₑ or between Cysₑ and Cys_{f}. Thus, the invention features any of the peptides described herein comprising the sequence Cysₐ Cys_{b} Xaa Xaa Cys, Cys_{d} Xaa Xaa Xaa Cysₑ Xaa Xaa Cys_{f} wherein: a) one amino acid is inserted between Cys_{b} and Cys_{c}; b) one amino acid is inserted between Cys_{d} and Cysₑ; c) one amino acid is inserted between Cysₑ and Cys_{f}; d) one amino acid is inserted between Cys_{b} and Cys_{c} and one amino acid is inserted between Cys_{d} and Cysₑ; e) one amino acid is inserted between Cys_{d} and Cysₑ and one amino acid is inserted between Cysₑ and Cys_{f}; f) one amino acid is inserted between Cys_{b} and Cys_{c} and one amino acid is inserted between Cysₑ and Cys_{f} or g) one amino acid is inserted between Cys_{b} and Cys_{c}, one amino acid is inserted between Cys_{d} and Cysₑ and one amino acid is inserted between Cysₑ and Cys_{f}. In addition, one or more amino acids can be inserted preceding Cysₐ and/or one or more amino acids can be inserted following Cys_{f}.

[0112] In various embodiments, the various insertion variants are peptides that bind to and/or activate the GC-C receptor. In various embodiments, the various insertion variants are peptides that increase cGMP levels.

[0113] Insertion variants of Cys Cys Glu Tyr Cys Cys Asn Pro Ala Cys Thr Gly Cys Tyr (SEQ ID NO:3) include those in which up to four amino acids (i.e., 0, 1, 2, 3 or 4) can be inserted after each amino acid. Thus, the invention includes peptides having the sequence: Cys Xaa₍₀₋₄₎ Cys Xaa₍₀₋₄₎ Glu Xaa₍₀₋₄₎ Tyr Xaa₍₀₋₄₎ Cys Xaa₍₀₋₄₎ Cys Xaa₍₀₋₄₎ Asn Xaa₍₀₋₄₎ Pro Xaa₍₀₋₄₎ Ala Xaa₍₀₋₄₎ Cys Xaa₍₀₋₄₎ Thr Xaa₍₀₋₄₎ Gly Xaa₍₀₋₄₎ Cys Xaa₍₀₋₄₎ Tyr Xaa₍₀₋₄₎₎ (SEQ ID NO: ). The inserted amino acids can be any amino acid or amino acid analog (natural or non-natural) and can be the same or different. In certain embodiments the inserted amino acids are all Gly or all Ala or a combination of Gly and Ala.

[0114] FIG. 12 depicts insertion variants of the peptide having the sequence: Cys Cys Glu Tyr Cys Cys Asn Pro Ala Cys Thr Gly Cys Tyr (SEQ ID NO:3).

[0115] The invention also features variants of peptides having the sequence Xaa₁ Xaa₂ Xaa₃ Xaa₄ Xaa₅ Cys₆ Cys₇ Xaa₈ Xaa₉ Cys₁₀ Cys₁₁ Xaa₁₂ Xaa₁₃ Xaa₁₄ Cys₁₅ Xaa₁₆ Xaa₁₇ Cys₁₈ Xaa₁₉ Xaa₂₀ Xaa₂₁ (SEQ ID NO: 1), e.g., variants of Cys Cys Glu Tyr Cys Cys Asn Pro Ala Cys Thr Gly Cys Tyr (SEQ ID NO:3), in which up to four amino acids are deleted and/or up to four amino acids are inserted. The insertions and deletions can be between Cys₆ and Cys₁₈ in SEQ ID NO: 1 or they can be amino terminal to Cys₆ and/or carboxy terminal to Cys₁₈ in SEQ ID NO:1.

[0116] The invention also features peptides which may include one or more of the peptide modifications, one or more non-natural amino acid or amino acid analogs, one or more of the disulfide bond alternatives or one more of the alternative peptide bonds described herein.

[0117] The peptides described herein can be present with a counterion. Useful counterions include salts of: acetate, benzenesulfonate, benzoate, calcium edetate, camsylate, carbonate, citrate, edetate (EDTA), edisylate, embonate, esylate, fumarate, gluceptate, gluconate, glutamate, glycollylarsanilate, hexylresorcinate, iodide, bromide, chloride, hydroxynaphthoate, isethionate, lactate, lactobionate, estolate, maleate, malate, mandelate, mesyl ate, mucate, nap sylate, nitrate, pantothenate, phosphate, salicyl ate, stearate, succinate, sulfate, tartarate, tartrate, hydrochlorate, theoclate, acetamidobenzoate, adipate, alginate, aminosalicylate, anhydromethylenecitrate, ascorbate, aspartate, camphorate, caprate, caproate, caprylate, cinnamate, cyclamate, dichloroacetate, formate, gentisate, glucuronate, glycerophosphate, glycolate, hippurate, fluoride, malonate, napadisylate, nicotinate, oleate, orotate, oxalate, oxoglutarate, palmitate, pectinate, pectinate polymer, phenylethylbarbiturate, picrate, propionate, pidolate, sebacate, rhodanide, tosylate, and tannate.

[0118] The peptides and agonist of the intestinal guanylate cyclase (GC-C) receptor can be used to treat constipation or decreased intestinal motility, slow digestion or slow stomach emptying. The peptides can be used to relieve one or more symptoms of IBS (bloating, pain, constipation), GERD (acid reflux into the esophagus), duodenogastric reflux, functional dyspepsia, or gastroparesis (nausea, vomiting, bloating, delayed gastric emptying) and other disorders described herein.

[0119] Also described herein is a purified polypeptide comprising (consisting essentially of or consisting of) the amino acid sequence:

X₁ Cys Glu X₂ X₃ X₄ Asn Pro Ala Cys Thr Gly X₅ X₆

wherein:
X₁, X₃, X₄ and X₅ are independently selected from: Ala, Arg, Asn, Asp, Cys, Gln, Glu, Gly, His, Ile, Leu, Lys, Met, Phe, Pro, Ser, Thr, Trp, Tyr and Val;
X₂ is selected from: Ala, Arg, Asn, Asp, Cys, Gln, Glu, Gly, His, Ile, Leu, Lys, Met, Phe, Pro, Ser, Thr, Trp, Tyr and Val; and
X₆ is selected from Phe, Trp and Tyr or is missing, provided that when both X₁ and X₄ are Ala and both X₃ and Xs are Cys or when both X₃ and Xs are Ala and both X₁ and X₄ are Cys or when X₁, X₃, X₄ and X₅ are all Cys, then either X₆ is selected from Phe and Trp or X₂ is not Leu.

[0120] In various embodiments: at least one of X₁, X₃, X₄ and X₅ is Cys; at least two of X₁, X₃, X₄ and X₅ are Cys; at least three of X₁, X₃, X₄ and X₅ is Cys; X₁, X₃, X₄ and X₅ are Cys; X₁ and X₄ are Cys; X₃ and X₅ are Gly or Ala; X₃ and X₅ are Cys; X₁ and X₄ are Gly or Ala; X₁, X₃, X₄ and X₅ are Cys; X₂ is selected from: Ala, Arg, Asn, Asp, Cys, Gln, Glu, Gly, His, Ile, Lys, Met, Phe, Pro, Ser, Thr, Val, Trp and Tyr; one of X₁, X₃, X₄ and X₅ is Gly or Ala and the rest are Cys; two of X₁, X₃, X₄ and X₅ are Gly or Ala and the rest are Cys; three of X₁, X₃, X₄ and X₅ are Gly or Ala and the rest are Cys; X₁ and X₄ are independently Gly or Ala and X₃ and X₅ are Cys; X₃ and X₅ are independent Gly or Ala and X₁ and X₄ are Cys; X₂ is Phe, Tyr or Trp; X₂ is Phe; X₂ is Tyr; X₂ is Trp; X₆ is Tyr; X₆ is missing; X₁ is Gly or Ala; X₃ is Gly or Ala; X₄ is Gly or Ala; X₅ is Gly or Ala; X₁ and X₄ are Ala and X₃ and X₅ are Cys; X₃ and X₅ are Ala and X₁ and X₄ are Cys; X₁ and X₄ are Gly and X₃ and X₅ are Cys; X₃ and X₅ are Gly and X₁ and X₄ are Cys; one of X₁ and X₄ is Ala and the other is Gly and X₃ and X₅ are Cys; an one X₃ and X₅ is Ala and the other is Gly and X₁ and X₄ are Cys; the polypeptide comprises 100 or fewer amino acids; the polypeptide comprises 20 or fewer amino acids; the polypeptide comprises 15 or fewer amino acids. Additional embodiments are shown in FIG. 18.

[0121] The variants of the forgoing polypeptides can be created by insertion or deletion of amino acids. For example, one or two amino acids within the sequence X₁ Cys Glu X₂ X₃X₄ Asn Pro Ala Cys Thr Gly X₅ X₆ can be deleted. The deleted amino acids can be selected from Glu, X₂, Asn, Pro, Ala, Thr and Gly in the sequence X₁ Cys Glu X₂ X₃X₄ Asn Pro Ala Cys Thr Gly X₅ X₆. In addition, insertions of 1, 2, 3, or 4 contiguous amino acids into a peptide having the sequence X₁ Cys Glu X₂ X₃X₄ Asn Pro Ala Cys Thr Gly X₅ X₆ can be made. Preferably the insertions are not between X₁ and Cys or between X₅ X₆ in a peptide having the sequence X₁ Cys Glu X₂ X₃X₄ Asn Pro Ala Cys Thr Gly X₅ X₆. Various insertion and deletion variants are depicted in FIGS. 19 and 20 (Xaa represents any amino acid, e.g., any of the amino acids listed in Table II.

[0122] Also described are therapeutic methods employing any of the forgoing polypeptides (both with and without the proviso. The therapeutic methods include treating a disorder selected from the group consisting of: a gastrointestinal disorder, cystic fibrosis, congestive heart failure, benign prostatic hyperplasia, the method comprising administering a composition comprising any of the forgoing polypeptides (both with and without the proviso). The disorders that can be treated include: a gastrointestinal motility disorder, irritable bowel syndrome, chronic constipation, a functional gastrointestinal disorder, gastroesophageal reflux disease, functional heartburn, dyspepsia, functional dyspepsia, nonulcer dyspepsia, gastroparesis, chronic intestinal pseudo-obstruction, colonic pseudo-obstruction, Crohn's disease, ulcerative colitis, and inflammatory bowel disease as well as other diseases and disorders described herein.

[0123] Also described are methods for producing any of the forgoing polypeptides comprising providing a cell harboring a nucleic acid molecule encoding the polypeptide, culturing the cell under conditions in which the peptide is expressed, and isolating the expressed peptide,

[0124] Also described are methods for producing any of the forgoing polypeptides comprising chemically synthesizing the peptide and then purifying the synthesized peptide.

[0125] Also described are pharmaceutical compositions comprising the forgoing polypeptides.

[0126] Also described are nucleic acid molecules encoding any of the forgoing polypeptides, vectors (e.g., expression vectors) containing such nucleic acid molecules and host cells harboring the nucleic acid molecules or vectors.

[0127] The details of one or more embodiments described herein are set forth in the accompanying description. All of the publications, patents and patent applications are hereby incorporated by reference.

### FIGURES

[0128] FIG. 1 a depicts the results of LCMS analysis of recombinant SEQ ID NO:4 peptide and SEQ ID NO:5 peptide.

[0129] FIGS. 1b and 1c depict the results of LCMS analysis of synthetic SEQ ID NO:3 peptide and the blank.

[0130] FIGS. 2a and b depict the results of the intestinal GC-C receptor activity assay of synthetic SEQ ID NO:4 peptide, SEQ ID NO:5 peptide, two different SEQ ID NO:3 peptides and SEQ ID NO:6 peptide.

[0131] FIG. 3 a depicts the effect of recombinant SEQ ID NO:4 peptide and Zelnorm® in an acute murine gastrointestinal transit model.

[0132] FIG. 3b depicts the effect of synthetic SEQ ID NO:3 peptide and Zelnorm® in an acute murine gastrointestinal transit model.

[0133] FIGS. 4a and 4b depict the effect of peptides SEQ ID NO: 5, SEQ ID NO:3, and SEQ ID NO:4 in an acute murine gastrointestinal transit model.

[0134] FIG. 4c depicts the effect of SEQ ID NO:3 peptide in a chronic murine gastrointestinal transit model.

[0135] FIGS. 4d and 4e depict the effect of Zelnorm®, and peptides SEQ ID NO:3, SEQ ID NO:6 in an acute rat gastrointestinal transit model.

[0136] FIG. 4f depicts the effect of SEQ ID NO:3 peptide on a gastrointestinal transit model in wild-type mice and mice lacking the guanylate cyclase C receptor.

[0137] FIG. 5a depicts the effect of SEQ ID NO:4 peptide and Zelnorm® in a suckling mouse intestinal secretion model.

[0138] FIG. 5b depicts the effects of SEQ ID NO:3 and Zelnorm® in a mouse intestinal secretion model.

[0139] FIGS. 6a, 6b, and 6c depict the effects of SEQ ID NO:4, SEQ ID NO:3, SEQ ID NO:5 and SEQ ID NO:6 peptides in a mouse intestinal secretion model.

[0140] FIGS. 7a and 7b show the results of experiments in which SEQ ID NO:3 activity was analyzed in either the TNBS colonic distension model or the PRS colonic distension model.

[0141] FIGS. 7c and 7d show the results of colonic distension experiments in wild-type and GC-C KO mice under basal and TNBS-inducing conditions in the presence and absence of SEQ ID NO:3.

[0142] FIGS. 7e and 7f show the results of baseline and water avoidance stress induced visceral nociception in the presence and absence of SEQ ID NO:3.

[0143] FIGS. 8a and 8b show the effects of differing doses of SEQ ID NO:5 and SEQ ID NO:3 in the PBQ writhing assay.

[0144] FIG. 9a shows the results of Kd determination analysis using SEQ ID NO:3 in a competitive radioligand binding assay.

[0145] FIG. 9b shows the results of SEQ ID NO:3 binding experiments in wild-type and GC-C KO mice.

[0146] FIGS. 10a and 10b show bioavailability data for IV and orally administered SEQ ID NO:3 as detected by an ELISA assay and LCMS.

[0147] FIG. 11 depicts deletion variants of a peptide having the sequence of SEQ ID NO:3.

[0148] FIG. 12 depicts insertion variants of a peptide having the sequence of SEQ ID NO:3.

[0149] FIG. 13a depicts the carboxypeptidase A digestion of a Z-Gly-Gly-Leu control peptide.

[0150] FIG. 13b depicts the carboxypeptidase digestion of SEQ ID NO:3.

[0151] FIG. 13c depicts the total ion current chromatography of carboxypeptidase A digested samples.

[0152] FIG. 13d depicts the spectrum view of the 3.3 min peak of T240 sample of SEQ ID NO:3.

[0153] FIG. 13e depicts the rate of formation of SEQ ID NO:3 product in the presence of Carboxypeptidase A.

[0154] FIG. 13f depicts the disappearance of SEQ ID NO:3 and the formation of SEQ ID NO:6.

[0155] FIG. 14a is an explanation of The Bristol Stool Form Scale (BSFS).

[0156] FIG. 14b shows the stool consistency scored by the subjects using the Bristol Stool Form Scale after a single dose of SEQ ID NO:3.

[0157] FIG. 14c shows the percent of subjects with at least a 2-point increase in BSFS consistency score (mean pre-dose compared to peak post-dose) after a single dose of SEQ ID NO:3.

[0158] FIG. 15a shows The Bristol Stool Form Scale scores for the different dosing groups of SEQ ID NO:3 the seven days prior to and the seven days during dosing.

[0159] FIG. 15b shows the Mean Stool Frequency (stools per week) for the subjects over 7 days treatment with varying doses of SEQ ID NO:3 or placebo.

[0160] FIG. 15c shows the Mean Stool Weight (g) over 7 days treatment with varying doses of is SEQ ID NO:3 or placebo.

[0161] FIG. 15d presents the Mean Ease of Passage Scale.

[0162] FIG. 15e shows the Mean Ease of Passage Scores for subjects treated over 7 days treatment with varying doses of SEQ ID NO: 3 or placebo.

[0163] FIG. 15f shows the mean time to first bowel movement for subjects treated over 7 days treatment with varying doses of SEQ ID NO: 3 or placebo.

[0164] FIG. 16 shows the effects of SEQ ID NO:3 in an in vivo model of post operative ileus.

[0165] FIGS. 17a-d show the effects of SEQ ID NO:3 and SEQ ID NO: 6 on cGMP activity and secretion in rodent ligated loop experiments

[0166] FIGS. 18-20 depict variants of SEQ ID NO:3.

[0167] FIG. 21 shows the effect of SEQ ID NO:3 on opioid induced constipation.

[0168] FIG. 22 shows mass spectrometry characterization of SEQ ID NO:3 fragments.

### DETAILED DESCRIPTION

[0169] The peptides described herein bind to the intestinal guanylate cyclase (GC-C) receptor, a key regulator of fluid and electrolyte balance in the intestine. When stimulated, this receptor, which is located on the apical membrane of the intestinal epithelial surface, causes an increase in intestinal epithelial cyclic GMP (cGMP). This increase in cgMP is believed to cause a decrease in water and sodium absorption and an increase in chloride and potassium ion secretion, leading to changes in intestinal fluid and electrolyte transport and increased intestinal motility. The intestinal GC-C receptor possesses an extracellular ligand binding region, a transmembrane region, an intracellular protein kinase-like region and a cyclase catalytic domain. Proposed functions for the GC-C receptor are fluid and electrolyte homeostasis, the regulation of epithelial cell proliferation and the induction of apoptosis (Shalubhai 2002 Curr Opin Drug Dis Devel 5:261-268).

[0170] In addition to being expressed in the intestine by gastrointestinal epithelial cells, GC-C is expressed in extra-intestinal tissues including kidney, lung, pancreas, pituitary, adrenal, developing liver and gall bladder (reviewed in Vaandrager 2002 Mol Cell Biochem 230:73-83, Kulaksiz et al. 2004, Gastroenterology 126:732-740) and male and female reproductive tissues (reviewed in Vaandrager 2002 Mol Cell Biochem 230:73-83). This suggests that the GC-C receptor agonists can be used in the treatment of disorders outside the GI tract, for example, congestive heart failure and benign prostatic hyperplasia. Ghrelin, a peptide hormone secreted by the stomach, is a key regulator of appetite in humans. Ghrelin expression levels are regulated by fasting and by gastric emptying (Kim et al. 2003 Neuroreprt 14:1317-20; Gualillo et al. 2003 FEBS Letts 552: 105-9). Thus, by increasing gastrointestinal motility, GC-C receptor agonists may also be used to regulate obesity.

[0171] In humans, the GC-C receptor is activated by guanylin (Gn) (U.S. Pat. No. 5,96,097), uroguanylin (Ugn) (U.S. Pat. No. 5,140,102) and lymphoguanylin (Forte et al. 1999 Enidocrinology 140:1800-1806). Interestingly, these agents are 10-100 fold lesspotent than aclass of bacterially derived peptides, termed ST (reviewed in Gianella 1995 J Lab Clin Med 125:173-181). ST peptides are considered super agonists of GC-C and are very resistant to proteolytic degradation.

[0172] ST peptide is capable of stimulating the enteric nervous system (Rolfe et al., 1994, J Physiolo 475: 531-537; Rolfe et al. 1999 Gut 44: 615-619; Nzegwu et al. 1996 Exp Physiol 81: 313-315). Also, cGMP has been reported to have antinociceptive effects in multiple animal models of pain (Lazaro Ibanez et al. 2001 Bur J Pharmacol 426: 39-44; Soares et al. 2001 British J Pharmacol 134: 127-131; Jain et al. 2001 Brain Res 909:170-178; Amarante et al. 2002 Eur J Pharmacol 454:19-23). Thus, GC-C agonists may have both an analgesic as well an anti-inflammatory effect.

[0173] In bacteria, ST peptides are derived from a preproprotein that generally has at least 70 amino acids. The pre and pro regions are cleaved as part of the secretion process, and the resulting mature protein, which generally includes fewer than 20 amino acids, is biologically active.

[0174] Among the known bacterial ST peptides are: E. coli ST Ib (Moseley et al. 1983 Infect. Immun. 39:1167) having the mature amino acid sequence Asn Ser Ser Asn Tyr Cys Cys Glu Leu Cys Cys Asn Pro Ala Cys Thr Gly Cys Tyr (SEQ ID NO:______); E. coli ST Ia (So and McCarthy 1980 Proc. Natl. Acad. Sci. USA 77:4011) having the mature amino acid sequence Asn Thr Phe Tyr Cys Cys Glu Leu Cys Cys Asn Pro Ala Cys Ala Gly Cys Tyr (SEQ HD NO:7). E. coli ST I* (Chan and Giannella 1981 J. Biol. Chem. 256:7744) having the mature amino acid sequence Asn Thr Phe Tyr Cys Cys Glu Leu Cys Cys Tyr Pro Ala Cys Ala Gly Cys Asn (SEQ ID NO:______); C. freundii ST peptide (Guarino et al. 1989b Infect. Immun. 57:649) having the mature amino acid sequence Asn Thr Phe Tyr Cys Cys Glu Leu Cys Cys Asn Pro Ala Cys Ala Gly Cys Tyr, (SEQ ID NO:______); Y. enterocolitica ST peptides, Y-ST(Y-STa), Y-STb, and Y-STc (reviewed in Huang et al. 1997 Microb. Pathog. 22:89) having the following pro-form amino acid sequences: Gln Ala Cys Asp Pro Pro Ser Pro Pro Ala Glu Val Ser Ser Asp Trp Asp Cys Cys Asp Val Cys Cys Asn Pro Ala Cys Ala Gly Cys (SEQ ID NO: (as well as a Ser-7 to Leu-7 variant of Y-STa (SEQ ID NO:______), (Takao et al. 1985 Eur. J. Biochem. 152:199)); Lys Ala Cys Asp Thr Gln Thr Pro Ser Pro Ser Glu Glu Asn Asp Asp Trp Cys Cys Glu Val Cys Cys Asn Pro Ala Cys Ala Gly Cys (SEQ ID NO:______); Gln Glu Thr Ala Ser Gly Gln Val Gly Asp Val Ser Ser Ser Thr Ile Ala Thr Glu Val Ser Gln Ala Glu Cys Gly Thr Gln Ser Ala Thr Thr Gln Gly Glu Asn Asp Trp Asp Trp Cys Cys Glu Leu Cys Cys Asn Pro Ala Cys Phe Gly Cys (SEQ ID NO:______), respectively; Y kristensenii ST peptide having the mature amino acid sequence Ser Asp Trp Cys Cys Gln Val Cys Cys Asn Pro Ala Cys Ala Gly Cys (SEQ ID NO:______); V. cholerae non-01 ST peptide (Takao et al. (1985) FEBS lett. 193:250) having the mature amino acid sequence Ile Asp Cys Cys Glu Ile Cys Cys Asn Pro Ala Cys Phe Gly Cys Leu Asn (SEQ ID NO:______; and V. mimicus ST peptide (Arita et al. 1991 FEMS Microbiol. Lett 79:105) having the mature amino acid sequence Ile Asp Cys Cys Glu Ile Cys Cys Asn Pro Ala Cys Phe Gly Cys Leu Asn (SEQ ID NO:______). Table I below provides sequences of all or a portion of a number of mature ST peptides and analogs thereof. Such peptides and peptides comprising these peptides are useful GCC agonists.

TABLE I

| | | |
|---|---|---|
| GenBank® | | |
| Accession | GenBank® | |
| No. | GI No. | Sequence |

| | | |
|---|---|---|
| QHECIB | 69638 | NSSNYCCELCCNPAGTGCY |
| | | (SEQ ID NO:_) |
| P01559 | 123711 | NTFYCCELCCNPACAGCY |
| | | (SEQ ID NO:_) |
| AAA24653 | 147878 | NTFYCCELCCNPACAPCY |
| | | (SEQ ID NO:_) |
| P01560 | 123707 | NTFYCCELCCYPACAGCN |
| | | (SEQ ID NO:_) |
| AAA27561 | 295439 | IDCCEICCNPACFGCLN |
| | | (SEQ ID NO:_) |
| P04429 | 123712 | IDCCEICCNPACFGCLN |
| | | (SEQ ID NO:_) |
| S34671 | 421286 | IDCCEICCNPACF |
| | | (SEQ ID NO:_) |
| CAA52209 | 395161 | IDCCEICCNPACFG |
| | | (SEQ ID NO:_) |
| A54534 | 628844 | IDCCEICCNPACFGCLN |
| | | (SEQ ID NO:_) |
| AAL02159 | 15592919 | IDRCEICCNPACFGCLN |
| | | (SEQ ID NO:_) |
| AAA18472 | 487395 | DWDCCDVCCNPACAGC |
| | | (SEQ ID NO:_) |
| S25659 | 282047 | DWDCCDVCCNPACAGC |
| | | (SEQ ID NO:_) |
| P74977 | 3913874 | NDDWCCEVCCNPACAGC |
| | | (SEQ ID NO:_) |
| BAA23656 | 2662339 | WDWCCELCCNPACFGC |
| | | (SEQ ID NO:_) |
| P31518 | 399947 | SDWCCEVCCNPACAGC |
| | | (SEQ ID NO:_) |
| | | QACDPPSPPAEVSSDWDCCDVCCDPAC AGC |
| | | QACDPPSPPAEVSSDWDCCDVCCNPACAG C |
| | | KACDTQTPSPSEENDDTCCEVCCNPACAG C |
| | | QETASGQVGDVSSSTIATEVSEAECGTQSAT |
| | | TQGENDWDWCCELCCNPACFGC |
| | | MKKLMLAIFISVLSFPSFSQSTESLDSSKEK |
| | | ITLETKKCDVVKNNSEKKSENMNNTFYCCEL |
| | | CCNPACAGCY |
| | | MKKSILFIFLSVLSFSPFAQDAKPVESSKEK |
| | | ITLESKKCNIAKKSNKSGPESMNSSNYCCEL |
| | | CCNPACTGCY |
| | | MKKIVFVLVLMLSSFGAFGQETVSGQFSDAL |
| | | STPITAEVYKQACDPPLPPAEVSSDWDCCDV |
| | | CCNPACAGC |
| | | GNLIDCCEICCNPACFGCLN |
| | | GNLIDRCEICCNPACFGCLN |
| | | PPAEVSSDWDCCDVCCNPACAGC |
| | | NYCCELCCNPACTGCF |

[0175] The immature (including pre and pro regions) form of E. coli ST-1A (ST-P) protein has the sequence: mkklmlaifisvlsfpsfsqstesldsskekitletkkcdvvknnsekkse nmnntfyocelccnpacagcy (SEQ ID NO:______; see GenBank® Accession No. P01559 (gi:123711). The pre sequence extends from aa 1-19. The pro sequence extends from aa 20-54. The mature protein extends from 55-72. The immature (including pre and pro regions) form of E. coli ST-1B (ST-H) protein has the sequence: mkksilfiflsvlsfspfaqdakpvesskekitleskkcniakksnksgpesrnssnyccelccnpactgcy (SEQ ID NO:______; see GenBank® Accession No. P07965 (gi:3915589)). The immature (including pre and pro regions) form of Y. enterocolitica ST protein has the sequence: mkkivfvlylmlssfgafgqetvsgqfsdalstpitaevykqacdpplppaevssdwdccdvccnpacagc (SEQ ID NO:______; see GenBank® Accession No. S25659 (gi:282047)).

[0176] The peptides described herein, like the bacterial ST peptides, have six Cys residues. These six Cys residues form three disulfide bonds in the mature and active form of the peptide. If the six Cys residues are identified, from the amino to carboxy terminus of the peptide, as A, B, C, D, E, and F, then the disulfide bonds form as follows: A-D, B-E, and C-F. The formation of these bonds is thought to be important for GC-C receptor binding. Certain of the peptides described herein include a potentially functional chymotrypsin cleavage site, e.g., a Trp, Tyr or Phe located between either Cys B and Cys D or between Cys E and Cys F. Cleavage at either chymotrypsin cleavage site may reduce or eliminates the ability of the peptide to bind to the GC-C receptor.

[0177] In the human body an inactive form of chymotrypsin, chymotrypsinogen is produced in the pancreas. When this inactive enzyme reaches the small intestine it is converted to active chymotrypsin by the excision of two di-peptides. Active chymotrypsin can potentially cleave peptides at the peptide bond on the carboxy-terminal side of Trp, Tyr or Phe. The presence of active chymotrypsin in the intestinal tract can potentially lead to cleavage of certain of the peptides described herein having an appropriately positioned functional chymotrypsin cleavage site. It is expected that chymotrypsin cleavage will moderate the action of a peptide described herein having an appropriately positioned chymotrypsin cleavage site as the peptide passes through the intestinal tract.

[0178] Trypsinogen, like chymotrypsin, is a serine protease that is produced in the pancreas and is present in the digestive tract. The active form, trypsin, will cleave peptides having a Lys or Arg. The presence of active trypsin in the intestinal tract can lead to cleavage of certain of the peptides described herein having an appropriately positioned functional trypsin cleavage site. It is expected that chymotrypsin cleavage will moderate the action of a peptide described herein having an appropriately positioned trypsin cleavage site as the peptide passes through the intestinal tract.

[0179] Many gastrointestinal disorders, including IBS, are associated with abdominal or visceral pain. Certain of the peptides described herein include analgesic or antinociceptive tags such as the carboxy-terminal sequence AspPhe immediately following a Trp, Tyr or Phe that creates a functional chymotrypsin cleavage site or following Lys or Arg that creates a functional trypsin cleavage site. Chymotrypsin in the intestinal tract can potentially cleave such peptides immediately carboxy terminal to the Trp, Phe or Tyr residue, releasing the dipeptide, AspPhe. This dipeptide has been shown to have analgesic activity in animal models (Abdikkahi et al. 2001 Fundam Clin Pharmacol 15:1 17-23; Nikfar et al 1997, 29:583-6; Edmundson et al 1998 Clin Pharmacol Ther 63:580-93). In this manner such peptides can treat both pain and inflammation. Other analgesic peptides can be present at the amino or carboxy terminus of the peptide (e.g., following a functional cleavage site) including: endomorphin-1, endomorphin-2, nocistatin, dalargin, lupron, and substance P.

[0180] A number of the useful peptides are based on the core sequence: Cys Cys Glu Leu Cys Cys Asn Pro Ala Cys Thr Gly Cys Tyr. To create a variant having a potentially functional chymotrypsin cleavage site capable of inactivating the peptide, either the Leu (underlined) or the Thr (underlined) can be replaced by Trp, Phe or Tyr or both the Leu and the Thr can be replaced by (independently) Trp, Phe or Tyr. To create a variant having an analgesic di-peptide, the core sequence is followed by Asp Phe. The carboxy terminal Tyr in the core sequence can allow the Asp Phe dipeptide to be released by chymotrypsin in the digestive tract. The core sequence can be optionally be preceded by Asn Ser Ser Asn Tyr or Asn.

[0181] Thus, useful variants based on the core sequence include:

(SEQ ID NO:4)

Asn Ser Ser Asn Tyr Cys Cys Glu Leu Cys Cys Asn
Pro Ala Cys Thr Gly Cys Tyr

(SEQ ID NO: - - - )

Asn Ser Ser Asn Tyr Cys Cys Glu Leu Cys Cys Asn
Pro Ala Cys Trp Gly Cys Tyr

(SEQ ID NO:5)

Asn Ser Ser Asn Tyr Cys Cys Glu Tyr Cys Cys Asn
Pro Ala Cys Thr Gly Cys Tyr

(SEQ ID NO:8)

Cys Cys Glu Leu Cys Cys Asn Pro Ala Cys Thr Gly
Cys Tyr

(SEQ ID NO: - - - )

Cys Cys Glu Leu Cys Cys Asn Pro Ala Cys Trp Gly
Cys Tyr

(SEQ ID NO:3)

Cys Cys Glu Tyr Cys Cys Asn Pro Ala Cys Thr Gly
Cys Tyr

(SEQ ID NO: - - - )

Asn Cys Cys Glu Leu Cys Cys Asn Pro Ala Cys Thr
Gly Cys Tyr

(SEQ ID NO: - - - )

Asn Cys Cys Glu Leu Cys Cys Asn Pro Ala Cys Trp
Gly Cys Tyr

(SEQ ID NO: - - - )

Asn Cys Cys Glu Phe Cys Cys Asn Pro Ala Cys Thr
Gly Cys Tyr

(SEQ ID NO: - - - )

Asn Cys Cys Glu Tyr Cys Cys Asn Pro Ala Cys Thr
Gly Cys Tyr

(SEQ ID NO: - - - )

Asn Cys Cys Glu Trp Cys Cys Asn Pro Ala Cys Thr
Gly Cys Tyr

(SEQ ID NO: - - - )

Asn Cys Cys Glu Arg Cys Cys Asn Pro Ala Cys Thr
Gly Cys Tyr

(SEQ ID NO: - - - )

Asn Cys Cys Glu Lys Cys Cys Asn Pro Ala Cys Thr
Gly Cys Tyr

(SEQ ID NO: - - - )

Asn Ser Ser Asn Tyr Cys Cys Glu Leu Cys Cys Asn
Pro Ala Cys Thr Gly Cys Tyr Asp Phe

(SEQ ID NO: - - - )

Asn Ser Ser Asn Tyr Cys Cys Glu Leu Cys Cys Asn
Pro Ala Cys Trp Gly Cys Tyr Asp Phe

(SEQ ID NO: - - - )

Asn Ser Ser Asn Tyr Cys Cys Glu Phe Cys Cys Asn
Pro Ala Cys Thr Gly Cys Tyr Asp Phe

(SEQ ID NO: - - - )

Asn Ser Ser Asn Tyr Cys Cys Glu Tyr Cys Cys Asn
Pro Ala Cys Thr Gly Cys Tyr Asp Phe

(SEQ ID NO: - - - )

Asn Ser Ser Asn Tyr Cys Cys Glu Trp Cys Cys Asn
Pro Ala Cys Thr Gly Cys Tyr Asp Phe

(SEQ ID NO: - - - )

Asn Ser Ser Asn Tyr Cys Cys Glu Arg Cys Cys Asn
Pro Ala Cys Thr Gly Cys Tyr Asp Phe

(SEQ ID NO: - - - )

Asn Ser Ser Asn Tyr Cys Cys Glu Lys Cys Cys Asn
Pro Ala Cys Thr Gly Cys Tyr Asp Phe

(SEQ ID NO: - - - )

Cys Cys Glu Leu Cys Cys Asn Pro Ala Cys Thr Gly
Cys Tyr Asp Phe

(SEQ ID NO: - - - )

Cys Cys Glu Leu Cys Cys Asn Pro Ala Cys Trp Gly
Cys Tyr Asp Phe

(SEQ ID NO: - - - )

Cys Cys Glu Phe Cys Cys Asn Pro Ala Cys Thr Gly
Cys Tyr Asp Phe

(SEQ ID NO: - - - )

Cys Cys Glu Tyr Cys Cys Asn Pro Ala Cys Thr Gly
Cys Tyr Asp Phe

(SEQ ID NO: - - - )

Cys Cys Glu Trp Cys Cys Asn Pro Ala Cys Thr Gly
Cys Tyr Asp Phe

(SEQ ID NO: - - - )

Cys Cys Glu Arg Cys Cys Asn Pro Ala Cys Thr Gly
Cys Tyr Asp Phe

(SEQ ID NO: - - - )

Cys Cys Glu Lys Cys Cys Asn Pro Ala Cys Thr Gly
Cys Tyr Asp Phe

(SEQ ID NO: - - - )

Asn Cys Cys Glu Leu Cys Cys Asn Pro Ala Cys Thr
Gly Cys Tyr Asp Phe

(SEQ ID NO: - - - )

Asn Cys Cys Glu Leu Cys Cys Asn Pro Ala Cys Trp
Gly Cys Tyr Asp Phe

(SEQ ID NO: - - - )

Asn Cys Cys Glu Phe Cys Cys Asn Pro Ala Cys Thr
Gly Cys Tyr Asp Phe

(SEQ ID NO: - - - )

Asn Cys Cys Glu Tyr Cys Cys Asn Pro Ala Cys Thr
Gly Cys Tyr Asp Phe

(SEQ ID NO: - - - )

Asn Cys Cys Glu Trp Cys Cys Asn Pro Ala Cys Thr
Gly Cys Tyr Asp Phe

(SEQ ID NO: - - - )

Asn Cys Cys Glu Arg Cys Cys Asn Pro Ala Cys Thr
Gly Cys Tyr Asp Phe

(SEQ ID NO: - - - )

Asn Cys Cys Glu Lys Cys Cys Asn Pro Ala Cys Thr
Gly Cys Tyr Asp Phe

[0182] In some cases, the peptides described herein are produced as a prepro protein that includes the amino terminal leader sequence: mkksilfiflsvlsfspfaqdakpvesskekitleskkcniakksnksgpesmn. Where the peptide is produced by a bacterial cell, e.g., E. coli, the forgoing leader sequence will be cleaved and the mature peptide will be efficiently secreted from the bacterial cell. U.S. Pat. No. 5,395,490 describes vectors, expression systems and methods for the efficient production of ST peptides in bacterial cells and methods for achieving efficient secretion of mature ST peptides. The vectors, expression systems and methods described in U.S. Pat. No. 5,395,490 can be used to produce the ST peptides and variant ST peptides of the present invention

### Variant Peptides

[0183] The invention includes variant peptides which can include one, two, three, four, five, six, seven, eight, nine, or ten (in some embodiments fewer than 5 or fewer than 3 or 2 or fewer) amino acid substitutions and/or deletions compared to SEQ ID NOs:______ to ______. The substitution(s) can be conservative or non-conservative. The naturally-occurring amino acids can be substituted by D-isomers of any amino acid, non-natural amino acids, natural and natural amino acid analogs and other groups. A conservative amino acid substitution results in the alteration of an amino acid for a similar acting amino acid, or amino acid of like charge, polarity, or hydrophobicity. At some positions, even conservative amino acid substitutions can alter the activity of the peptide. A conservative substitution can substitute a naturally-occurring amino acid for a non-naturally-occurring amino acid. The amino acid substitutions among naturally-occurring amino acids are listed in Table II.

TABLE II

| For Amino Acid | Code | Replace with any of |
|---|---|---|
| Alanine | Ala | Gly, Cys, Ser |
| Arginine | Arg | Lys, His |
| Asparagine | Asn | Asp, Glu, Gln, |
| Aspartic Acid | Asp | Asn, Glu, Gln |
| Cysteine | Cys | Met, Thr, Ser |
| Glutamine | Gln | Asn, Glu, Asp |
| Glutamic Acid | Glu | Asp, Asn, Gln |
| Glycine | Gly | Ala |
| Histidine | His | Lys, Arg |
| Isoleucine | Ile | Val, Leu, Met |
| Leucine | Leu | Val, Ile, Met |
| Lysine | Lys | Arg, His |
| Methionine | Met | Ile, Leu, Val |
| Phenylalanine | Phe | Tyr, His, Trp |
| Proline | Pro | |
| Serine | Ser | Thr, Cys, Ala |
| Threonine | Thr | Ser, Met, Val |
| Tryptophan | Trp | Phe, Tyr |
| Tyrosine | Tyr | Phe, His |
| Valine | Val | Leu, Ile, Met |

[0184] In some circumstances it can be desirable to treat patients with a variant peptide that binds to and activates intestinal GC-C receptor, but is less active than the non-variant form the peptide. This reduced activity can arise from reduced affinity for the receptor or a reduced ability to activate the receptor once bound or reduced stability of the peptide.

### Production of Peptides

[0185] Useful peptides can be produced either in bacteria including, without limitation, E. coli, or in other existing systems for peptide or protein production (e.g., Bacillus subtilis, baculovirus expression systems using Drosophila Sf9 cells, yeast or filamentous fungal expression systems, mammalian cell expression systems), or they can be chemically synthesized.

[0186] If the peptide or variant peptide is to be produced in bacteria, e.g., E. coli, the nucleic acid molecule encoding the peptide will preferably also encode a leader sequence that permits the secretion of the mature peptide from the cell. Thus, the sequence encoding the peptide can include the pre sequence and the pro sequence of, for example, a naturally-occurring bacterial ST peptide. The secreted, mature peptide can be purified from the culture medium.

[0187] The sequence encoding a peptide described herein is preferably inserted into a vector capable of delivering and maintaining the nucleic acid molecule in a bacterial cell. The DNA molecule may be inserted into an autonomously replicating vector (suitable vectors include, for example, pGEM3Z and pcDNA3, and derivatives thereof). The vector nucleic acid may be a bacterial or bacteriophage DNA such as bacteriophage lambda or M13 and derivatives thereof. Construction of a vector containing a nucleic acid described herein can be followed by transformation of a host cell such as a bacterium. Suitable bacterial hosts include but are not limited to, E. coli, B. subtilis, Pseudomonas, Salmonella. The genetic construct also includes, in addition to the encoding nucleic acid molecule, elements that allow expression, such as a promoter and regulatory sequences. The expression vectors may contain transcriptional control sequences that control transcriptional initiation, such as promoter, enhancer, operator, and repressor sequences. A variety of transcriptional control sequences are well known to those in the art. The expression vector can also include a translation regulatory sequence (e.g., an untranslated 5′ sequence, an untranslated 3′ sequence, or an internal ribosome entry site). The vector can be capable of autonomous replication or it can integrate into host DNA to ensure stability during peptide production.

[0188] The protein coding sequence that includes a peptide described herein can also be fused to a nucleic acid encoding a polypeptide affinity tag, e.g., glutathione S-transferase (GST), maltose E binding protein, protein A, FLAG tag, hexa-histidine, myc tag or the influenza HA tag, in order to facilitate purification. The affinity tag or reporter fusion joins the reading frame of the peptide of interest to the reading frame of the gene encoding the affinity tag such that a translational fusion is generated. Expression of the fusion gene results in translation of a single polypeptide that includes both the peptide of interest and the affinity tag. In some instances where affinity tags are utilized, DNA sequence encoding a protease recognition site will be fused between the reading frames for the affinity tag and the peptide of interest.

[0189] Genetic constructs and methods suitable for production of immature and mature forms of the peptides and variants described herein in protein expression systems other than bacteria, and well known to those skilled in the art, can also be used to produce peptides in a biological system.

[0190] Mature peptides and variants thereof can be synthesized by the solid-phase chemical synthesis. For example, the peptide can be synthesized on Cyc(4-CH₂ Bxl)-OCH₂-4-(oxymethyl)-phenylacetamidomethyl resin using a double coupling program. Protecting groups must be used appropriately to create the correct disulfide bond pattern. For example, the following protecting groups can be used: t-butyloxycarbonyl (alpha-amino groups); acetamidomethyl (thiol groups of Cys residues B and E); 4-methylbenzyl (thiol groups of Cys residues C and F); benzyl (y-carboxyl of glutamic acid and the hydroxyl group of threonine, if present); and bromobenzyl (phenolic group of tyrosine, if present). Coupling is effected with symmetrical anhydride of t-butoxylcarbonylamino acids or hydroxybenzotriazole ester (for asparagine or glutamine residues), and the peptide is deprotected and cleaved from the solid support in hydrogen fluoride, dimethyl sulfide, anisole, and p-thiocresol using 8/1/1/0.5 ratio (v/v/v/w) at 0° C. for 60 min. After removal of hydrogen fluoride and dimethyl sulfide by reduced pressure and anisole and p-thiocresol by extraction with ethyl ether and ethyl acetate sequentially, crude peptides are extracted with a mixture of 0.5M sodium phosphate buffer, pH 8.0 and N,N-dimethylformamide using 1/1 ratio, v/v. The disulfide bond for Cys residues B and E is the formed using dimethyl sulfoxide (Tam et al. (1991) J. Am. Chem. Soc. 113:6657-62). The resulting peptide is the purified by reverse-phase chromatography. The disulfide bond between Cys residues C and F is formed by first dissolving the peptide in 50% acetic acid in water. Saturated iodine solution in glacial acetic acid is added (1 ml iodine solution per 100 ml solution). After incubation at room temperature for 2 days in an enclosed glass container, the solution is diluted five-fold with deionized water and extracted with ethyl ether four times for removal of unreacted iodine. After removal of the residual amount of ethyl ether by rotary evaporation the solution of crude product is lyophilized and purified by successive reverse-phase chromatography.

[0191] Peptides can also be synthesized by many other methods including solid phase synthesis using traditional FMOC protection (i.e., coupling with DCC-HOBt and deprotection with piperidine in DMF). Cys thiol groups can be trityl protected. Treatment with TFA can be used for final deprotection of the peptide and release of the peptide from the solid-state resin. In many cases air oxidation is sufficient to achieve proper disulfide bond formation.

### Example 1

### Preparation of Variant ST Peptides and Wild-Type ST Peptide

[0192] 1a: Preparation of Recombinant Variant ST Peptides and Wild-type ST Peptide

[0193] A variant ST peptide having the sequence Asn Ser Ser Asn Tyr Cys Cys Glu Tyr Cys Cys Asn Pro Ala Cys Thr Gly Cys Tyr (SEQ ID NO:5) was produced recombinantly and tested in an animal model. A peptide having the sequence of the wild-type ST peptide was also created (SEQ ID NO:4).

[0194] SEQ ID NO:5 and SEQ ID NO:4 peptides were produced as preproproteins using vectors produced as follows. A sequence encoding a heat-stable enterotoxin pre-pro sequence was amplified from pGK51/pGSK51 (ATCC 67728) using oligonucleotide M03514 (5′ CACACCATATGAAGAAATCAATATTATTTATTTTTCTTTCTG 3′ (SEG ID NO: )) and oligonucleotide MO3515 (5′ CACACCTCGAGTTAGGTCTCCATGCTTTCAGGACCACTTATTAC 3′ (SEQ ID NO: ______). The amplification product fragment was digested with NdeI/XhoI and ligated to the T7 expression vector, pET26b(+) (Novagen) digested with NdeI/XhoI thereby-creating plasmid MB3976. The region encoding the pre-pro protein was sequenced and found to encode the amino acid sequence: mkksilfiflsvlsfspfaqdakpagsskekitleskkcnivkksnksgpesm (SEQ ID NO:______) which differs from the amino acid sequence of heat-stable enterotoxin a2 precursor (sta2; mkksilfiflsvlsfspfaqdakpagsskekitleskkcnivkknnesspesm (SEQ ID NO:______; Genanka Accession No. Q47185, GI: 3913876) at three positions (indicated by underlining and bold text) near the C-terminus. To create expression vectors with the pre-pro sequence, complementary oligos encoding each ST peptide variant or wild-type ST peptide were annealed and cloned into the MB3976 expression vector. To create MB3984 (encoding SEQ ID NO:4 peptide (wild-type ST peptide) as a prepro protein), containing the amino acid sequence, NSSNYCCELCCNPACTGCY (SEQ ID NO:______) fused downstream of the pre-pro sequence, MB 3976 was digested with BsaI/XhoI and ligated to annealed oligos MO3621 (5′ GCATGAATAGTAGCAATTACTGCTGTGAATTGTGTTGTAATCCTGCTTGTACCG GGTGCTATTAATAAC-3′ (SEQ ID NO:______)) and M03622 (5′ TCGAGTTATTAATAGCACCCGGTACAAGCAGGATTACAACACAATTCACAGCA GTAATTGCTACTATTC 3′(SEQ ID NO:______). To create MB3985 (encoding SEQ ID NO: 5 as a prepro protein) containing the following amino acid sequence, NSSNYCCEYCCNPACTGCY fused downstream of the pre-pro sequence, MB 3976 was digested with BsaI/XhoI and ligated to annealed oligos MO3529 (5′ GCATGAATAGTAGCAATTACTGCTGTGAATATTGTTGTAATCCTGCTTGTACCGG GTGCTATTAATAAC 3′ (SEQ ID NO:______) and MO03530 (5′ TCGAGTTATTAATAGCACCCGGTACAAGCAGGATTACAACAATATTCACAGCAG TAATTGCTACTATTC 3′(SEQ ID NO:______).

[0195] The SEQ ID NO:5 peptide and the SEQ ID NO:4 peptide were produced as follows. The expression vectors were transformed into E. coli bacterial host BL21 λ DE3 (Invitrogen). A single colony was innoculated and grown shaking overnight at 30° C. in L broth +25 mg/l kanamycin. The overnight culture was added to 3.2 L of batch medium (Glucose 25 g/l, Caseamino Acids 5 g/l, Yeast Extract 5 g/l, KH₂PO₄ 13.3 g/l, (NH₄)₂HPO₄ 4 g/l, MgSO₄.7H₂O 1.2 g/l, Citric Acid 1.7 g/l, EDTA 8.4 mg/l, CoCl₂-6H₂O 2.5 mg/l, MnCl₂-4H₂O 15 mg/l, CuCl₂-4H₂O 1.5 mg/l, H₃BO₃ 3 mg/l, Na₂MoO₄.2H₂O 2.5 mg/l, Zn Acetate-2H₂O 13 mg/l, Ferric Citrate 100 mg/l, Kanamycin 25 mg/l, Antifoam DF₂O₄ 1 ml/l) and fermented using the following process parameters:pH 6.7—control with base only (28% NH₄OH), 30° C., aeration: 5 liters per minute. After the initial consumption of batch glucose (based on monitoring dissolved oxygen (DO) levels), 1.5 L of feed medium (Glucose 700 g/l, Caseamino Acids 10 g/l, Yeast Extract 10 g/l, MgSO₄.7H₂O 4 g/l, EDTA 13 mg/l, CoCl₂-6H₂O 4 mg/l, MnCl₂-4H₂O 23.5 mg/l, CuCl₂-4H₂O 2.5 mg/l, H₃BO₃ 5 mg/l, Na₂MoO₄.2H₂O 4 mg/l , Zn Acetate-2H₂O 16 mg/l, Ferric Citrate 40 mg/l, Antifoam DF₂O₄ 1 ml/l) was added at a feed rate controlled to maintain 20% DO. IPTG was added to 0.2 mM 2 hours post feed start. The total run time was approximately 40-45 hours (until feed exhaustion).

[0196] Cells were collected by centrifugation at 5,000g for 10 minutes. The cell pellet was discarded and the supernatant was passed through a 50 Kd ultrafiltration unit. The 50 Kd filtrate (0.6 liters) was loaded onto a 110 ml Q-Sepharose fast Flow column (Amersham Pharmacia, equilibrated with 20 mM Tris-HCl pH 7.5) at a flow rate of 400 ml/hour. The column was washed with six volumes of 20 mM Tris-HCl pH 7.5 and proteins were eluted with 50 mM acetic acid collecting 50 ml fractions. Fractions containing ST peptide variant or wild-type ST peptide were pooled and the solvent was removed by rotary evaporation. The dried proteins were resuspended in 10 ml of 8% acetic acid, 0.1% trifluoroacetic acid (TFA) and loaded onto a Varian Polaris C18-A column (250×21.2 mm 10 μm, equilibrated in the same buffer) at a flow rate of 20 ml/min. The column was washed with 100 ml of 8% methanol, 0.1% TFA and developed with a gradient (300 ml) of 24 to 48% methanol, 0.1% TFA, collecting 5-ml fractions. Fractions containing peptide were pooled and the solvent was removed by rotary evaporation. The peptides were dissolved in 0.1% TFA and lyophilized.

[0197] The SEQ ID NO:5 peptide and SEQ ID NO:4 peptide fractions were analyzed by standard LCMS and HPLC. LCMS analysis revealed that SEQ ID NO:5 peptide is more homogeneous than SEQ ID NO: 4 peptide (see FIG. 1a; note that SEQ ID NO:5 peptide exhibits fewer peaks (Panel B) than SEQ ID NO:4 peptide (Panel A)).

[0198] 1b: Preparation of Synthetic Variant ST Peptides and Wild-type ST Peptide

[0199] Peptides were chemically synthesized by a commercial peptide synthesis company. Varying yields of peptides were obtained depending on the efficiency of chemical synthesis. Thus, the four peptides, in decreasing order of yield were: Cys Cys Glu Tyr Cys Cys Asn Pro Ala Cys Thr Gly Cys Tyr (SEQ ID NO:3), 10-20% yield; Cys Cys Glu Leu Cys Cys Asn Pro a Cys Thr Gly Cys Tyr (SEQ ID NO:8); Ast Ser Ser Asn Tyr Cys Cys Olu Tyr Cys Cys Asn Pro Ala Cys Thr Gly Cys Tyr (SEQ ED NO: 5); Asn Ser Ser Asn Tyr Cys Cys Glu Leu Cys Cys Asn Pro Ala Cys Thr Gly Cys Tyr (SEQ ID NO:SEQ ID NO:4), <5% yield. Thus the specific amino acid changes introduced into the peptides can create improved manufacturing properties.

[0200] FIG. 1b shows the total ion chromatograph profile of synthetically manufactured SEQ ID NO:3 peptide. FIG. 1c shows the total ion chromatograph profile of the control blank sample. There is one major peak present in the SEQ ID NO:3 peptide sample that is not also present in the control sample. Quantitative analysis suggests the SEQ ID NO:3 peptide is >98% pure.

### Example 2

### Activation of the Intestinal GC-C Receptor by a Variant ST Peptide and ST Peptide

[0201] The ability of SEQ ID NO:5, SEQ ID NO:4, SEQ ID NO:3, and SEQ ID NO:6 to activate the intestinal GC-C receptor was assessed in an assay employing the T84 human colon carcinoma cell line (American Type Culture Collection (Bethesda, Md.)). For the assays cells were grown to confluency in 24-well culture plates with a 1:1 mixture of Ham's F12 medium and Dulbecco's modified Eagle's medium (DMEM), supplemented with 5% fetal calf serum and were used at between passages 54 and 60.

[0202] Briefly, monolayers of T84 cells in 24-well plates were washed twice with 1 ml/well DMEM, then incubated at 37° C. for 10 min with 0.45 ml DMEM containing 1 mM isobutylmethylxanthine (IBMX), a cyclic nucleotide phosphodiesterase inhibitor, Test peptides (50 μl) were then added and incubated for 30 minutes at 37° C. The media was aspirated and the reaction was then terminated by the addition of ice cold 0.5 ml of 0.1N HCl. The samples were held on ice for 20 minutes and then evaporated to dryness using a heat gun or vacuum centrifugation. The dried samples were resuspended in 0.5 ml of phosphate buffer provided in the Cayman Chemical Cyclic GMP EIA kit (Cayman Chemical, Ann Arbor, Mich.). Cyclic GMP was measured by ELA according to procedures outlined in the Cayman Chemical Cyclic GMP EIA kit.

[0203] FIGS. 2a and 2b show the activity of chemically synthesized peptide variants in this GC-C receptor activity assay. In this assay, SEQ ID NO:4 and two different SEQ ID NO:3 peptides (SEQ ID NO:3(a) and SEQ ID NO:3(b), synthesized by two different methods) had activity comparable to SEQ ID NO:4. SEQ ID NO:5 and SEQ ID NO:4 peptide were chemically synthesized in a manner identical to that of SEQ ID NO:3(b). SEQ ID NO:6 was chemically synthesized in a manner identical to that of SEQ ID NO:3(a).

### Example 3

### Intestinal Transit in Rodents can be Increased by Administering Certain Peptides

[0204] In order to determine whether the peptides increase the rate of gastrointestinal transit, the peptides and controls were tested using a murine gastrointestinal transit (GIT) assay (Moon et al. Infection and Immunity 25:127, 1979). In this assay, charcoal, which can be readily visualized in the gastrointestinal tract is administered to mice after the administration of a test compound. The distance traveled by the charcoal is measured and expressed as a percentage of the total length of the colon.

[0205] Mice were fasted with free access to water for 12 to 16 hours before the treatment with peptide or control buffer. The peptides were orally administered at 1 μg/kg-1 mg/kg of peptide in buffer (20 nM Tris pH 7.5) 7 minutes before being given an oral dose of 5% Activated Carbon (Aldrich 242276-250G). Control mice were administered buffer only before being given a dose of Activated Carbon. After 15 minutes, the mice were sacrificed and their intestines from the stomach to the cecum were dissected. The total length of the intestine as well as the distance traveled from the stomach to the charcoal front was measured for each animal and the results are expressed as the percent of the total length of the intestine traveled by the charcoal front. All results are reported as the average of 10 mice±standard deviation. A comparison of the distance traveled by the charcoal between the mice treated with peptide versus the mice treated with vehicle alone was performed using a Student's t test and a statistically significant difference was considered for P<0.05. P-values are calculated using a two-sided T-Test assuming unequal variances.

[0206] As can be seen in FIG. 3a and FIG. 3b, wild-type ST peptide SEQ ID NO:4, (Sigma-Aldrich, St Louis, Mo.); 0.1 mg/kg), synthetically manufactured SEQ ID NO:3 and Zeinorm® (0.1 mg/kg), a drug approved for IBS that is an agonist for the serotonin receptor 5HT4, increase gastrointestinal transit rate in this model. FIG. 4a shows the result of a study demonstrating that intestinal transit rate increases with an increasing dosage of either recombinantly synthesized SEQ ID NO:4 or SEQ ID NO:5. FIG. 4b shows the results of a study demonstrating both chemically synthesized SEQ ID NO:4 or SEQ ID NO:3 peptide increase intestinal transit rates more than either Tris buffer alone or an equivalent dose of Zelnorm®.

[0207] The identical experiment was performed to determine if SEQ ID NO:3 is effective in a chronic dosing treatment regimen. Briefly, 8 week old CD1 female mice are dosed orally once a day for 5 days with either SEQ ID NO:3 (0.06 mg/kg or 0.25 mg/kg in 20 mM Tris pH 7.5) or vehicle alone (20 mM Tris pH 7.5). On the 5^{th} day, a GIT assay is performed identical to that above except 200 μl of a 10% charcoal solution is administered. FIG. 4c shows the results of a study demonstrating both chemically synthesized SEQ ID NO:3 or Zelnorm® are effective in a mouse gastrointestinal motility assay upon chronic dosing (daily for 5 days). The results are shown side by side with acute dosing (1 day).

[0208] The gastrointestinal transit assay was also performed in male and female CD rats (Charles River; Wilmington, Mass.) weighing between 136-191 g with an average weight of 167.6 g. The assay was performed as described above for mice except an average of 5-8 animals were used for each test group and test peptide and 5% activated carbon were administered simultaneously (versus 7 minutes apart). In addition, the animals were sacrificed 10 minutes after the administration of peptide and test compound. FIG. 4d shows the results of a study demonstrating that intestinal transit increases following the administration of SEQ ID NO:3, but not Zelnorm® in the rat GIT assay. FIG. 4e shows the results of a study demonstrating that intestinal transit increases in a dose dependent manner with the administration of either SEQ ID NO:3 or SEQ ID NO:6 in female rats. Similar effects were seen in male rats.

[0209] The gastrointestinal transit assay was also performed in wild-type mice and mice lacking the guanylate cyclase C receptor (GC-C KO; Mann et al 1997 Biochem and Biophysical Research Communications 239:463). Wild type and GC-C KO mice were fasted overnight and SEQ ID NO: 3 or vehicle alone were orally administered 10 minutes prior to an oral dose of a 10% Activated Carbon/10% Gum Arabic suspension. Animals were sacrificed 5 minutes after peptide or vehicle administration. FIG. 4F shows the results of the gastrointestinal transit assay in 14 wild-type and 14 GC-C KO female mice. In vehicle treated animals) no difference was observed in transit rate between wild-type and GC-C KO animals. When compared to vehicle (20 mM Tris pH 7.5) alone, an increase (p<0.001) in gastrointestinal transit rate was observed upon oral treatment with 100 μg/kg of SEQ ID NO:3 in wild-type but not GC-C KO mice. Similar effects were observed in male mice.

### Example 4

### Certain Peptides Increase Intestinal Secretion in Suckling Mice (SuMi Assay)

[0210] SEQ ID NO:4 peptide and SEQ ID NO:3 were tested for their ability to increase intestinal secretion using a suckling mouse model of intestinal secretion. In this model a test compound is administered to suckling mice that are between 7 and 9 days old. After the mice are sacrificed, the gastrointestinal tract from the stomach to the cecum is dissected (“guts”). The remains (“carcass”) as well as the guts are weighed and the ratio of guts to carcass weight is calculated. If the ratio is above 0.09, one can conclude that the test compound increases intestinal secretion. FIG. 5a shows a dose response curve for wild-type ST peptide (SEQ ID NO:4) in this model. FIG. 5b shows dose response curve for the SEQ ID NO:3 peptide in this model. These data show that wild-type ST peptide (purchased from TDT, Inc. West Chester, Pa.) and the SEQ ID NO:3 peptide increase intestinal secretion. The effect of Zelnorm® was also studied. As can be seen from FIG. 5, Zelnorm® at 0.2 mg/kg does not increase intestinal secretion in this model. FIG. 6a shows a dose response curve for the recombinant SEQ ID NO:4 peptide described above and the recombinant SEQ ID NO:5 peptide described above. As can be seen from FIG. 6a, both peptides increase intestinal secretion in this model. Similarly FIG. 6b shows a dose response curve for chemically synthesized SEQ ID NO:5, SEQ ID NO:3 and SEQ ID NO:4 as well as wild-type ST peptide (purchased from Sigma-Aldrich, St Louis, Mo.). FIG. 6c shows a dose response curve for chemically synthesized SEQ ID NO:3 and SEQ ID NO:6.

### Colonic Hyperalgesia Animal Models

[0211] Hypersensitivity to colorectal distension is common in patients with IBS and may be responsible for the major symptom of pain. Both inflammatory and non-inflammatory animal models of visceral hyperalgesia to distension have been developed to investigate the effect of compounds on visceral pain in IBS.

[0212] I. Trinitrobenzenesulphonic Acid (TNBS)-Induced Rectal Allodynia in Two Rodent Models

### TNBS Visceral Hypersensitivity Rat Model

[0213] Male Wistar rats (220-250 g) were premedicated with 0.5 mg/kg of acepromazine injected intraperitoneally (IP) and anesthetized by intramuscular administration of 100 mg/kg of ketamine. Pairs of nichrome wire electrodes (60 cm in length and 80 μm in diameter) were implanted in the striated muscle of the abdomen, 2 cm laterally from the white line. The free ends of electrodes were exteriorized on the back of the neck and protected by a plastic tube attached to the skin. Electromyographic (EMG) recordings were started 5 days after surgery. Electrical activity of abdominal striated muscle was recorded with an electroencephalograph machine (Mini VIII, Alvar, Paris, France) using a short time constant (0.03 sec.) to remove low-frequency signals (<3 Hz).

[0214] Ten days post surgical implantation, trinitrobenzenesulphonic acid (lNBS) was administered to induce rectal inflammation. TNBS (80 mg kg⁻¹ in 0.3 ml 50% ethanol) was administered intrarectally through a silicone rubber catheter introduced at 3 cm from the anus under light diethyl-ether anesthesia, as described (Morteau et al. 1994 Dig Dis Sci 39:1239). Following TNBS administration, rats were placed in plastic tunnels where they were severely limited in mobility for several days before colorectal distension (CRD). Experimental compound was administered one hour before CRD which was performed by insertion into the rectum, at 1 cm of the anus, a 4 cm long balloon made from a latex condom (Gue et al, 1997 Neurogastroenterol. Motil. 9:271). The balloon was fixed on a rigid catheter taken from an embotectomy probe (Fogarty). The catheter attached balloon was fixed at the base of the tail. The balloon, connected to a barostat, was inflated progressively by step of 15 mmHg, from 0 to 60 mmHg, each step of inflation lasting 5 min. Evaluation of rectal sensitivity, as measured by EMG, was performed before (1-2 days) and 3 days following rectal instillation of TNBS.

[0215] The number of spike bursts that corresponds to abdominal contractions was determined per 5 min periods. Statistical analysis of the number of abdominal contractions and evaluation of the dose-effects relationships was performed by a one way analysis of variance (ANOVA) followed by a post-hoc (Student or Dunnett tests) and regression analysis for ED50 if appropriate.

[0216] FIG. 7a shows the results of experiment in which SEQ ID NO: 3 activity was analyzed in the TNBS colorectal model. Significant decreases in abdominal response are observed at 0.3 μg/kg and 3 μg/kg SEQ ID NO:3. These results demonstrate that SEQ ID NO:3 reduces pain associated with colorectal distension in this animal model.

### TNBS Visceral Hypersensitivity Model in Wild-Type (WT) Mice and Mice Lacking the Guanylate-cyclase C Receptor (GC-C KO)

[0217] TNBS induced visceral hypersensitivity was assessed in WT and GC-C KO mice. Two groups (WT and GC-C KO) of male mice (22-25g) were surgically prepared for electromyographic (EMG) recordings. Three electrodes were implanted in the striated muscles of the abdomen for EMG recording of abdominal contractions. Colorectal distension (CRD) was performed with a balloon inflated by 10 s steps of 0.02 ml from 0 to 0.12 ml. Under basal conditions mice were submitted to control CRD (time 0) followed by oral administration of SEQ ID NO:3 (0.01 and 0.3 μg/kg) or vehicle only (distilled water, 1 ml) at 3 hours. One hour post dosing the CRD procedure was repeated. Abdominal EMG contractile response to colorectal distension in basal conditions in both WT and GC-C KO mice (12-14 mice per group) was determined in the absence of vehicle and SEQ ID NO:3, and the mean +/− standard error of the mean (SEM) is graplhically depicted in FIG. 7c. GC-C KO mice exhibited a decreased EMG contractile response to CRD when compared to wild-type mice. SEQ ID NO:3 dosing of WT and GC-C KO mice under basal conditions decreased the EMG response to colorectal distension in WT but not GC-C KO mice.

[0218] For TNBS induced visceral hypersensitivity conditions, mice were submitted to control CRD (time 0) and TNBS (20 mg/kg) was administered at 3 days. Three days post intracolonic TNBS-induction animals were orally admistered SEQ ID NO:3 (0.01 and 0.3 μg/kg) or vehicle (distilled water, 1 ml) 1 hour before CRD. The effect of SEQ ID NO:3 (0.01 μg/kg) on abdominal response to colorectal distension after TNBS in WT and GC-C KO mice (12-14 per group) at a volume distension of 0.8 ml was determined and the mean +/− standard error of the mean (SEM) is graphically depicted in FIG. 7d. SEQ ID NO:3 reduces the TNBS induced hypersensitivity to CRD in WT mice at 0.01 μg/kg. A similar effect was not observed in GC-C KO mice.

[0219] II. Partial Restraint Stress-induced Hyperalgesia Model

[0220] Five groups of female Wistar rats (weighing 200-250 g each), were surgically prepared for electromyography as described (Morteau et al. 1994 Dig Dis Sci 39:1239-48) and were used to evaluate the effects of SEQ ID NO:3 on colorectal sensitivity and compliance after a 2 hour partial restraint stress session. Partial restraint stress (PRS), a relatively mild stress, was induced as previously described (Morteau et al., 1994 Dig Dis Sci 39:1239-48). Female rats were lightly anesthetized with diethyl ether and their shoulders, upper forelimbs and thoracic trunk were wrapped in a confining harness of paper tape to restrict, but not prevent body movements. Control sham-stress animals were anesthitized but not wrapped. Animals received isobaric colorectal distensions (CRD) directly prior to (control CRD) and 15 minutes after two hours of partial restraint induced stress. Rats were treated orally with SEQ ID NO:3 (0.3, 3, 30 ug/kg) or vehicle only (distilled water 1 mL) one hour before the CRD procedure. For the CRD procedure, rats were acclimatized to restraint in polypropylene tunnels (diameter: 7 cm; length: 20 cm) periodically for several days before CRD in order to minimize recording artifacts. The balloon used for distension was 4 cm long and made from a latex condom. It was fixed on a rigid catheter taken from an embolectomy probe (Fogarty). CRD was performed by insertion of the balloon in the rectum at 1 cm from the anus. The tube was fixed at the base of the tail. Isobaric distensions were performed from 0 to 60 mmHg, with each distension step lasting 5 minutes. The first distension was performed at a pressure of 15 mmHg and an increment of 15 mmHg was added at each following step, until a maximal-pressure of 60 mmHg was attained. Electromyographic recordings commenced 5 days after surgery. Electrical activity was recorded with an electroencephalograph (Mini VIII, Alvar, Paris, France) using a short time constant (0.03 sec.) to remove low-frequency signals (<3 Hz) and a paper speed of 3.6 cm/minute. Isobaric distensions of the colon were performed by connecting the balloon to a computerized barostat. Colonic pressure and balloon volume were continuously monitored on a potentiometric recorder (L6514, Linseis, Selb, Germany) with a paper speed of 1.0 cm/minute. The number of spike bursts, corresponding to abdominal contractions, was evaluated per 5-minute period. Colorectal volumes were determined as the maximal volume obtained for each stage of distension using the potentiometric recorder. Statistical analysis of these two parameters was performed using a one way analysis of variance (ANOVA) followed by an unpaired two-tailed Student's t test using GraphPad Prism 4.0. p values<0.05 were considered significantly different. The values were expressed as mean±SEM. FIG. 7b shows the results of an experiment in which SEQ ID NO:3 activity was analysed in the Stress-Induced Hyperalgesia model. SEQ ID NO:3 reduced the response to CRD alter PRS (p<0.0001) at a distending pressure of 15 mm Hg when administered at doses of 0.3 and 3.0 μg/kg.

[0221] III. Water Avoidance Stress-Induced Hyperalgesia Model

[0222] The effect of SEQ ID NO:3 on basal visceral nociception in a model of water avoidance stress-induced visceral hyperalgesia in adult male Wistar rats was tested. The stress involved confining rats to a platform surrounded by water for a period of 1 hour and then measuring their visceromotor response to colonic distension using electromyography (EMG).

[0223] At least 7 days prior to stress measurements, animals were deeply anesthetized with pentobarbital sodium (45 mg/kg) and equipped with electrodes implanted into the external oblique musculature, just superior to the inguinal ligament. Electrode leads were then tunneled subcutaneously and externalized laterally for future access. Following surgery, rats were housed in pairs and allowed to recover for at least 7 days. On the day of the experiment, animals were lightly anesthetized with halothane, and a lubricated latex balloon (6 cm) was inserted intra-anally into the descending colon. Animals were allowed to recover for 30 minutes, and colorectal distension (CRD) was initiated. The CRD procedure consisted of graded intensities of phasic CRD (10, 20, 40, 60 mmHg; 20 s duration; 4 min inter-stimulus interval). Visceromotor response (VMR) to CRD was quantified by measuring EMG activity. To determine the effects of SEQ ID NO:3 on basal visceral nociception, a baseline CRD was recorded. Animals were allowed 1 hour recovery and then SEQ ID NO:3 or vehicle was orally administered. At 1 hour following administration of SEQ ID NO:3 or vehicle CRD was repeated. Administration of 30 μg/kg of SEQ ID NO:3 increased basal visceral nociception as compared to vehicle only. The mean value (+/−SEM) of in vehicle and SEQ ID NO:3 treated groups (n=7 for each group) is graphically depicted in FIG. 7e. Oral administration of SEQ ID NO:3 at a lower dose (3 μg/kg) had no effects on basal visceral.

[0224] To determine the effect of SEQ ID NO:3 in a model of water avoidance stress-induced visceral hyperalgesia, a baseline CRD was recorded and then the animals were subjected to 1 hour of water avoidance stress. For water avoidance stress, the test apparatus consisted of a Plexiglas tank with a block affixed to the center of the floor. The tank was filled with fresh room temperature water (25° C.) to within 1 cm of the top of the block. The animals were placed on the block for a period of 1 h. The sham water avoidance stress consisted in placing the rats on the same platform in a waterless container. A second CRD was performed at 24 hours post water avoidance stress. Following the second CRD, animals were allowed 1 hour recovery and then SEQ ID NO:3 or vehicle was orally administered. At 1 hour following administration of SEQ ID NO:3 or vehicle CRD was repeated. Following water avoidance stress, 3 μg/kg of SEQ ID NO:3 exhibited anti-hyperalgesic properties, by reducing the increased visceromotor response to colorectal distension (CRD) 24 hours after stress. This effect is graphically depicted (mean+/−SEM; n=7) in FIG. 7f.

### Phenylbenzoguinone-Induced Writhing Model

[0225] The PBQ-induced writhing model can be used to assess pain control activity of the peptides and GC-C receptor agonists described herein. This model is described by Siegmund et al. (1957 Proc. Soc. Exp. Bio. Med. 95:729-731). Briefly, one hour after oral dosing with a test compound, e.g., a peptide, morphine or vehicle, 0.02% phenylbenzoquinone (PBQ) solution (12.5 mL/kg) is injected by intraperitoneal route into the mouse. The number of stretches and writhings are recorded from the 5^{th} to the 10^{th} minute after PBQ injection, and can also be counted between the 35^{th} and 40^{th} minute and between the 60^{th} and 65^{th} minute to provide a kinetic assessment. The results are expressed as the number of stretches and writhings (mean±SEM) and the percentage of variation of the nociceptive threshold calculated from the mean value of the vehicle-treated group. The statistical significance of any differences between the treated groups and the control group is determined by a Dunnett's test using the residual variance after a one-way analysis of variance (P<0.05) using SigmaStat Software.

[0226] FIGS. 8a and 8b show the effect of different doses of SEQ ID NO:5 and SEQ ID NO:3 in the PBQ writhing assay. Indomethacin, an NSAID (nonsteroidal anti-inflammatory drug) with known pain control activity, was used as the positive control in the assay. Significant reductions in writhings were observed for SEQ ID NO:5 (1 mg/kg dose) and SEQ ID NO: 3 (2.5 mg/kg dose) compared to the vehicle control. Loss of efficacy at the highest dose tested has also been observed for multiple other compounds (such as 5HT-3 antagonists) tested in similar assays. The results of this study suggest that both SEQ ID NO:5 and SEQ ID NO:3 have antinociceptive effects in this visceral pain model comparable to the intermediate doses of indomethacin.

### Example 5

### SEQ ID NO:3 Kd Determination and Binding Assays

[0227] To determine the affinity of SEQ ID NO:3 for GC-C receptors found in rat intestinal mucosa, a competition binding assay was performed using rat intestinal epithelial cells. Epithelial cells from the small intestine of rats were obtained as described by Kessler et al. (J. Biol. Chem. 245: 5281-5288 (1970)). Briefly, animals were sacrificed and their abdominal cavities exposed. The small intestine was rinsed with 300 ml ice cold saline or PBS. 10 cm of the small intestine measured at 10 cm from the pylorus was removed and cut into 1 inch segments. Intestinal mucosa was extruded from the intestine by gentle pressure between a piece of parafilm and a P-1000 pipette tip. Intestinal epithelial cells were placed in 2 ml PBS and pipetted up and down with a 5 ml pipette to make a suspension of cells. Protein concentration in the suspension was measured using the Bradford method (Anal. Biochem. 72: 248-254 (1976)).

[0228] A competition binding assay was performed based on the method of Giannella et al. (Am. J. Physiol. 245: G492-G498) between [¹²⁵I] labeled SEQ ID NO:4 and SEQ ID NO:3. The assay mixture contained: 0.5 ml of DME with 20 mM HEPES-KOH pH 7.0, 0.9 mg of the cell suspension listed above, 21.4 fmol [¹²⁵I]-SEQ ID NO:4 (42.8 pM), and different concentrations of competitor SEQ ID NO:3 (0.01 to 1000 nM). The mixture was incubated at room temperature for 1 hour, and the reaction stopped by applying the mixture to GF/B glass-fiber filters (Whatman). The filters were washed with 5 ml ice-cold PBS and radioactivity was measured. FIG. 9a shows that the Kd for SEQ ID NO:3 in this assay is 4.5 nm. % B/Bo is the percentage of the ratio of radioactivity trapped in each sample (B) compared to the radioactivity retained in a control sample with no cold competitor (Bo). Giannella et al. (Am. J. Physiol. 245: G492-G498) observed that the Kd for wild-type ST peptide in this same assay was ˜13 nm.

[0229] Similar competition binding assays were performed in intestinal epithelial cells from wild-type and guanylate cyclase C knockout (GC-C KO; Mann et al. 1997 Biochem and Biophysical Research Communications 239:463) mice. Mouse intestinal epithelial cells were prepared identical to that above as for rat intestinal epithelial cells except the cells were homogenized with an Omni homogenizer for 20 seconds on the maximum setting to make a suspension of cells. A competition binding assay was performed identical to that described above between ¹²⁵I labeled SEQ ID NO:3 and unlabeled SEQ ID NO:3 (competitor). FIG. 9b shows the results of an assay in which ¹²⁵I-SEQ ID NO:3 was prepared and incubated alone or with an excess of unlabeled SEQ ID NO:3 with isolated intestinal epithelial cells from two female wild-type and two female GC-C KO mice.

[0230] There is a reduction in SEQ ID NO:3 binding to intestinal epithelial cells from GC-C KO mice when compared to wild-type mice.

[0231] The binding of SEQ ID NO:3 and SEQ ID NO:6 to GC-C receptors on the cell surface of human colonic cells (T84 cellsl ATCC Catalog No. CCL-248) was characterized in a competitive radioligand-binding assay at pH conditions of 5, 7 and 8. The radiolabeled tracer used in these experiments was ¹²⁵I-SEQ ID NO:7. To determine binding constants, competitive inhibition of binding was used. T84 cells were cultured in T-150 plastic flasks in DMEM and Ham's F-12 medium containing 5% fetal bovine serum. Monolayers at 60-70% confluency (approximately 10⁷ cells) were collected by gentle scraping followed by centrifugation, and washed twice in 50 mL of phosphate-buffered saline (PBS). The cells were resuspended in 1 mL DMEM containing 20 mM N-(2-hydroxylmethyl)piperazine-N′-(2-ethanesulfonic acid) (Hepes), pH 7.0 and 0.5% bovine serum albumin (BSA). T84 cells were incubated with a constant amount of ¹²⁵I-SEQ ID NO:7 containing various concentrations of cold competitor. Free ¹²⁵I-SEQ ID NO:7 was separated from bound tracer by rapid suction filtration. The binding reactions were carried out in 1.5 mL microfuge tubes in 0.24 mL of DMEM/20 mM Hepes pH 7.0/0.5% BSA containing: 2.5×10⁵ T84 cells (0.25 mg protein), 200,000 cpm ¹²⁵I-SEQ ID NO:7 (41 fmol, 170 pM), and 0.01 to 1,000 nM competitor. Binding assays at pH 5.0 were done in DMEM/20 mM 2-(N-morpholino) ethanesulfonic acid (Mes), pH 5.0. Binding assays in pH 8.0 were done in DMEM/20 mM Hepes/50 mM sodium bicarbonate pH 8.0. One sample contained no competitor (B₀) and another contained no cells. After incubation at 37° C. for 1 h, the reaction mixtures were applied to Whatman GF/B glass-fiber filters by suction filtration. The filters were then rinsed with 10 mL ice-cold PBS buffer, inserted into plastic tubes, and added to 2 mL scintillation fluid. Radioactivity was measured in a LS 6500 liquid scintillation counter (Beckman-Coulter). The percent bound in each sample is calculated by the equation:

% B/B₀=(sample cpm−no cells cpm)×100/(B₀cpm−no cells cpm)

[0232] Competitive radioligand-binding curves were generated using the Graphpad PRISM™ computer program. Nonlinear regression analysis of the binding data was used to calculate the concentration of competitor that resulted in 50% radioligand bound (IC₅₀). The apparent dissociation equilibrium constant (Kᵢ) for each competitor was obtained from the IC₅₀ values and the previously reported estimate of the dissociation constant for the radioligand, K_{d}≅15 nM (Hamra et al. 1997 PNAS 2705-10) and the method of Cheng and Prusoff 1973 Biochem Pharmacol 22:3099-108. Using a two site model, high and low affinity-binding sites were identified on T84 cells (Kᵢ₁ and Kᵢ₂) for all the test agents. At pH 7.0. for SEQ ID NO:3 Kᵢ₁ ranged from 0.89-1.23 nM and Kᵢ₂ ranged from 88.9-156 nM. The SEQ ID NO:6 binding affinities at pH 7.0 were Kᵢ₁=1.57 nM and Kᵢ₂=446 nM. The SEQ ID NO:3 binding affinities at pH 5.0 were Kᵢ₁=1.38 nM and Kᵢ₂=17 nM. At pH 8.0 the high and low affinity binding sites were Kᵢ₁=0.6 and Kᵢ₂=94.4 nM respectively. Thus, binding of SEQ ID NO:3 to the high affinity site, Kᵢ₁, was not affected by pH.

### Example 6

### Pharmacokinetic Properties of SEQ ID NO:3

[0233] To study the pharmacokinetics of SEQ ID NO:3, absorbability studies in mice were performed by administering SEQ ID NO:3 intravaneously via tail vein injection or orally by gavage to 8-week-old CD1 mice. Serum was collected from the animals at various time points and tested for the presence of SEQ ID NO:3 using a competitive enzyme-linked immunoabsorbent assay (Oxoid, ST EIA kit, Cat#TD0700). The assay utilized monoclonal antibodies against ST peptide (antibodies are provided in the Oxoid kit) and synthetically manufactured SEQ ID NO:3. FIG. 10a shows absorption data for intravenously and orally administered SEQ ID NO:3 as detected by the ELISA assay. SEQ ID NO:3 appears to be minimally systemically absorbed and is <2.2% bioavailable.

[0234] A similar bioavailability study was performed in which LCMS rather than ELISA was used to detect SEQ ID NO:3. Initially, serum samples were extracted from the whole blood of exposed and control mice, then injected directly (10 mL) onto an in-line solid phase extraction (SPE) column (Waters Oasis HLB 25 μm column, 2.0×15 mm direct connect) without further processing. The sample on the SPE column was washed with a 5% methanol, 95% dH₂O solution (2.1 mL/min, 1.0 minute), then loaded onto an analytical column using a valve switch that places the SPE column in an inverted flow path onto the analytical column (Waters Xterra MS C8 5 μm IS column, 2.1×20 mm). The sample was eluted from the analytical column with a reverse phase gradient (Mobile Phase A: 10 mM ammonium hydroxide in dH₂O, Mobile Phase B: 10 mM ammonium hydroxide in 80% acetonitrile and 20% methanol; 20% B for the first 3 minutes then ramping to 95% B over 4 min. and holding for 2 min., all at a flow rate of 0.4 mL/min.). At 9.1 minutes, the gradient returns to the initial conditions of 20% B for 1 min. SEQ ID NO:3 eluted from the analytical column at 1.45 minutes, and was detected by triple-quadrapole mass spectrometry (MRM, 764 (+2 charge state)>182 (+1 charge state) Da; cone voltage=30V; collision=20 eV; parent resolution=2 Da at base peak; daughter resolution=2 Da at base peak). Instrument response was converted into concentration units by comparison with a standard curve using known amounts of chemically synthesized SEQ ID NO:3 prepared and injected in mouse serum using the same procedure.

[0235] FIG. 10b shows absorption data for IV and orally administered SEQ ID NO:3 as detected by LCMS. In this assay, SEQ ID NO:3 appears similarly minimally systemically absorbed and is <0.11% bioavailable.

[0236] Similarly, oral bioavailabity was determined in rats using LCMS methodology. Rat plasma samples containing SEQ ID NO:3 and/or SEQ ID NO:6 were extracted using a Waters Oasis MAX 96 well solid phase extraction (SPE) plate. A 200 μL volume of rat plasma was mixed with 200 μL of ¹³C₉, ¹⁵N—SEQ ID NO:3 in the well of a prepared SPE plate. The samples were drawn through the stationary phase with 15 mm Hg vacuum. All samples were rinsed with 200 μL of 2% ammonium hydroxide in water followed by 200 μL of 20% methanol in water. The samples were eluted with consecutive 100 μL volumes of 5/20/75 formic acid/water/methanol and 100 μL 5/15/80 formic acid/water/methanol. The samples were dried under nitrogen and resuspended in 100 μL of 20% methanol in water. Samples were analyzed by a Waters Quattro Micro mass spectrometer coupled to a Waters 1525 binary pump with a Waters 2777 autosampler. A 40 μL volume of each sample was injected onto a Thermo Hypersil GOLD C18 column (2.1×50 mm, 5 um). SEQ ID NO:3 and SEQ ID NO:6 were eluted by a gradient over 3 minutes with acetonitrile and water containing 0.05% trifluoroacetic acid. The Quattro Micro mass spectrometer was run in multiple reaction monitoring (MRM) mode using the mass transitions of 764>182 and 682>136 for SEQ ID NO:3 and SEQ ID NO:6 respectively. Using this methodology, SEQ ID NO:3 was dosed orally and by IV to rats at 10 mg/kg. The area under the curve (AUC) for orally dosed SEQ ID NO:3 was 776.6 nM-min, while the AUC for intravenously administered SEQ ID NO:3 was 738,855 nM-min. In addition, SEQ ID NO:6 was detected in the plasma of rats dosed with SEQ ID NO:3, showing that this is a metabolite in rats. The AUC for SEQ ID NO:6 in rats dosed orally with SEQ ID NO:3 was 216 nM-min and the AUC for SEQ ID NO:6 in SEQ ID NO:3 intravenously dosed rats was 3580 nm-min. From the AUC values, the 6 b bioavailability of SEQ ID NO:3 determined by circulating plasma levels is 0.11%. When AUC values for SEQ ID NO:6 are included in the calculation, the 6 h bioavailability increases to 0.13%. To determine the oral biovailability of SEQ ID NO:6, this peptide was dosed to rats at 10 mg/kg. In this experiment, the limit of detection (LOD) for SEQ ID NO:6 was 0.78 nM. SEQ ID NO:6 was detected at all time points for the intravenous dose and was not detected beyond 240 min for the oral dose. For non-detected values, the LOD was used as an upper estimate of the concentration of SEQ ID NO:6. The calculated value for AUCp.o., (0-6h) was <1308 mM-min and AUCi.v., (0-6h) was 1,590,000 nM-min. The 6 h bioavailability of SEQ ID NO:6 determined by circulating plasma levels was 0.08%

[0237] Oral bioavailability was also determined using a radioimmunoassay (RIA) detection method. Female CD-1 mice (Charles River, Wilmington, Mass.) weighing approximately 25g (7-8 weeks old) or female CD rats (Charles River, Wilmington, Mass.) weighing approximately 153 g were included in this study. Monoclonal antibody, 20C1 (Brandwein et al. 1985 Infect Immun. 47:242-246), which recognizes SEQ ID NO:7 and ¹²⁵I labeled-SEQ ID NO:7, a labeled tracer, were used in these experiments. The labeled tracer was purified by HPLC using a Waters C-18u Bondapak® column (25 cm) previously equilibrated with 10 mM ammonium acetate pH 5.8. A gradient from 0 to 25% acetonitrile was applied to the column in 60 min, followed by isocratic elution at 25% acetonitrile for another 20 min. This method separated two monoiodinated forms from each other and from unlabeled precursor (Thompson et al. 1985 Anal Biochem. 148:26-36). The first monoiodinated peak (Peak 1) had a retention time of 60 min and corresponded to iodination of the C-terminal tyrosine, and was used as the labeled tracer in this study. The labeled tracer bad a specific activity of 2200 Ci/mmol. The tracer was stored in aliquots at −20° C. Animals were fasted overnight before administration of compounds. Animals received SEQ ID NO:3 (rats—10 mg/kg; mice 8 mg/kg) or vehicle alone (20 mM Tris-HCl, ph7.5) intravenously or orally. Blood was drawn from all dosed animals by retro-orbital eye bleeding at specific intervals and test compound levels were analyzed by radioimmunoassay (RIA). SEQ ID NO:3 was extracted from the serum or plasma using Amersham Biosciences Amprep C18 columns (100 mg). Samples (80 μL) were first diluted to 0.5 mL with start buffer (8% methanol, 0.095% TFA in water) and applied to C18 columns previously conditioned with 1 mL methanol and equilibrated with 2 mL of start buffer. After washing with 1 mL start buffer, SEQ ID NO:3 was eluted with 0.8 mL of 80% methanol, 0.05% TFA and dried down in a centrifugal evaporator. Samples were reconstituted in 0.194 mL assay buffer (PBS buffer, pH 7.4, containing 10% fetal bovine serum). Standard dilutions of SEQ ID NO:3 (0 to 256 nM) were made in rat plasma. To perform RIA analysis, samples from dosed animal and standards were mixed with 5 μL diluted antibody (in RIA wash buffer: phosphate-buffered saline (PBS) containing 0.1% bovine serum albumin (BSA), 1:40,000 final dilution, 0.0022 μg), and incubated 1 to 4 h at 4° C. One tube contained the zero standard (B₀) and another no standard and no antibody (non-specific binding, NSB). Labeled tracer (0.018 μCi, diluted in RIA wash buffer) was then added and incubated at 4° C. for 12 to 18 h. The antibody bound fraction containing SEQ ID NO:3 was collected by magnetic separation using 10 μL of sheep anti-mouse IgG beads previously washed twice in 10 volumes RIA assay buffer. The beads were then washed twice with 1 mL of RIA wash buffer, collected by magnetic separation, resuspended in 0.1 mL of RIA wash buffer, and added to 2 mL scintillation fluid. Radioactivity was measured in a LS 6500 scintillation counter (Beckman-Coulter). The binding efficiency is defined as the percent radioactivity in the B₀ sample compared to the input counts. The percent bound in each sample was calculated by the equation:

% B/B₀=(sample cpm−NSB cpm)×100/(B₀ cpm−NSB cpm)

[0238] A standard curve was prepared by plotting % B/B₀ as a function of the log SEQ ID NO:3 concentration. A concentration vs. time plot was generated from the data in GraphPad Prism or Summit Software PK Solutions 2.0 to generate oral and i.v. PK curves. The area under the curve from T=0 to 4 hours (AUC₀₋₄ₕ) was calculated by the software for both p.o. and i.v. dosed animals. If the values were below the lower limit of detection (LOD) than the LOD was used to estimate the value (in this experiment 2 nM). Oral Bioavailabilty (F) is calculated using the equation:

F=(AUC_{p.o.,(0-4h)}*D_{i.v.})/ (AUC_{i.v.,(0-4h)}*D_{p.o.})

where D_{i.v} and D_{p.o.} equal the intravenous and oral dose, respectively. For SEQ ID NO:3 administed to mice, the calculated AUC_{p.o.,(0-4h)} was ≦0.69 ug-min/mL, the AUC_{i.v.,(0-4h)} was 1660.98 ug-min/mL and the bioavailability (F) was ≦0.04%. The estimated bioavailability of 8 mg/kg SEQ ID NO:3 in mice using the RIA method is not more than 0.04% over 4 hours. For SEQ ID NO:3 administed to rats, the calculated value of AUC_{p.o.,(0-6h)} was 2.90 ug-min/mL, the AUC_{i.v.,(0-6h)} was 1422.64 ug-min/mL and the bioavailability was 0.20%. The estimated bioavailability of 10 mg/kg SEQ ID NO:3 in rats using the RIA method is not more than 0.20% over 6 hours.

### Example 7

### In Vitro Proteolytic Stability of SEQ ID NO:3

[0239] The stability of SEQ ID NO:3 in the presence of several mammalian digestive enzymes was determined. SEQ ID NO:3 was exposed to a variety of in vitro conditions including digestive enzymes and low ph environments designed to simulate gastric fluid. SEQ ID NO:3 was incubated with chymotrypsin, trypsin, pepsin, aminopeptidase, carboxypeptidase A, and simulated gastric fluid (sgf) at ph 1.0. Samples were collected at 0, 3, and 24 h for all conditions except pepsin digestion and the SGF. For the latter two conditions, samples were obtained at 0, 1, and 3 h. Negative control samples were prepared for initial and final time points. A separate, positive activity control was run in parallel to SEQ ID NO:3. All samples were analyzed by LC/MS

### Chymotrypsin

[0240] 500 μl samples of 0.01 mg/mL SEQ ID NO:3 and guanylin (Sigma-Aldrich, G116; positive control) were prepared in the chymotrypsin reaction buffer (100 mM Tris-HCl, 10 mM CaCl₂, pH 7.5) in 2 mL eppendorf tubes. Zero and 24 h control samples were prepared by adding 5 μL of a 10 mM chymostatin (Sigma-Alrich, C7268; a chymotrypsin inhibitor) stock for a final concentration of 100 μM. All samples were incubated at 37° C. for 5 min. 20 μL of a 0.01 mg/mL chymotrypsin stock (α-chympotrypsin from bovine pancreas; Sigma-Aldrich, C6423) were added to each sample for a 0.0004 mg/mL final concentration. Samples were returned to the 37° C. water bath. The reaction was quenched with 5 μL of a 10 mM chymostatin stock at each time point for a final concentration of 100 μM. No extra chymostatin was added to the control samples as they already had inhibitor. Samples were subsequently flash frozen in liquid nitrogen, and stored at −80° C. until analysis. Upon analysis, samples were thawed and transferred to a 1 mL 96-well plate. Standards of SEQ ID NO:3 and guanylin were prepared in chyrnotrypsin reaction buffer at 0.625, 1.25, 2.50, 5.00, and 10.00 μg/mL concentrations. These standards were used to generate a standard curve for quantification of samples. When necessary, the standard curves were also used to calculate the concentration of the corresponding digestion product. 10 μL injections were made of each sample and standard.

### Trypsin

[0241] 500 μL samples of 0.01 mg/mL SEQ ID NO:3 and BAEE (Nₐₗₚₕₐ Benzoyl-L-arginine ethyl ester hydrochloride; Sigma-Aldrich, B4500; positive control) were prepared with trypsin reaction buffer (100 mM Tris-HCl, pH 7.5) in 2 mL eppendorf tubes. Zero and 24 h time point control samples were prepared were prepared (N=1) with 5 μL of a 100 mg/mL AEBSF (4-(2-Aminoethyl)benzenesulfonyl fluoride hydrochloride; a trypsin inhibitor) stock for a final concentration of 1 mg/mL. All control and test samples (0, 3, and 24 h) were incubated at 37° C. for 5 min. Twenty (20) μL of a 0.01 mg/mL trypsin (Sigma-Aldrich, T6467) stock were added to each sample for a final concentration of 0.0004 mg/mL. Samples were returned to the 37° C. water bath. The reaction was quenched with 5 μL of a 100 mg/mL AEBSF stock, which was added to each sample at the indicated timepoint, for a final concentration of 1 mg/mL. No extra AEBSF was added to the control samples as they already had inhibitor. Samples were subsequently flash frozen in liquid nitrogen, and stored at −80° C. until analysis. Upon analysis, samples were thawed and transferred to a 1 mL 96-well plate. Standards of SEQ ID NO:3 and BAEE were prepared in trypsin reaction buffer at 0.625, 1.25, 2.50, 5.00, and 10.00 μg/mL concentrations. These standards were used to generate a standard curve for quantification of samples. When necessary, the standard curves were also used to calculate the concentration of the corresponding digestion product. Ten (10) μL injections were made of each sample and standard.

### Pepsin

[0242] 500 μL samples of 100 U/mL pepsin (Pepsin porcine gastric mucosa; Sigma-Aldrich, P68871; U=release of 0.01 absorbance at 280 nM (A280) as TCA soluble hydrolysis products per min at 37° C. of hemoglobin) were prepared in the pepsin reaction buffer (100 mM HCl-KCl, pH 2.0) in 5 mL polystyrene round bottom tubes. To the control samples (0 and 24 h), 500 μL of a 1 M ammonium acetate (pepsin inhibitor) stock were added, for a final concentration of 0.5 M. All control and test samples (0, 1, and 3 h) were incubated at 37° C. for 5 min, while shaking. Fifty (50) μL of 0.1 mg/mL SEQ ID NO:3 and Insulin B chain, oxidized (Sigma-Aldrich, 16383; positive control), stocks were added to the respective tubes. Samples were returned to the 37° C. shaking water bath. Reactions were quenched by the addition of 500 μL of 1 M ammonium acetate for a final concentration of 0.5 M (except to the control samples, which already contained 0.5 M ammonium acetate). Samples were cooled on ice and stored at 4° C. until analysis. Upon analysis, samples were transferred to a 1 mL 96-well plate. Standards of SEQ ID NO:3 and Insulin B chain, oxidized, were prepared in 25 mM Tris-hydrochloric acid, 500 mM sodium chloride, pH 7.5 buffer at 0.625, 1.25, 2.50, 5.00, and 10.00 μg/mL concentrations. These standards were used to generate a standard curve for quantification of samples. Ten (10) μL injections were made of each sample and standard.

### Aminopeptidase

[0243] 500 μl samples of 0.01 mg/mL SEQ ID NO:3 and chemically synthesized SEQ ID NO:4 (wild type ST; positive control) were prepared in the aminopeptidase reaction buffer (5 mM Tris-HCl, 5 mM MgCl₂, pH 7.5) in 2 mL eppendorf tubes. 5 μL of a 5 mg/mL Bestatin hydrochloride, (BioChermika, 08170; an aminopeptidase inhibitor) stock was added to each control sample (0 and 24 h), for a final concentration of 0.05 mg/nL. All control and test samples (0, 3, and 24 h) were incubated at 37° C. for 5 nm in. 0.02 U aminopeptidase (Aminopeptidase M, amino acid aryl amidase (Roche, 102768; U=hydrolysis of 1.0 umol of L-leucinamide to leucine and NH3 per min at pH 8.5 at 25° C.) were added to each sample. Samples were returned to the 37° C. water bath. The reaction was quenched with 5 μL of a 5 mg/mL Bestatin hydrochloride stock at the proper time point. No extra Bestatin hydrochloride was added to the control samples since they already had inhibitor present. Samples were subsequently flash frozen in liquid nitrogen, and stored at −80° C. until analysis. Upon analysis, samples were thawed and transferred to a 1 mL 96-well plate. Standards of SEQ ID NO:3 and SEQ ID NO:4 were prepared in aminopeptidase reaction buffer at 0.625, 1.25, 2.50, 5.00, and 10.00 μg/mL concentrations. These standards were used to generate a standard curve for quantification of samples. When necessary, the standard curves were also used to calculate the concentration of the corresponding digestion product. Ten (10) μL injections were made of each sample and standard.

### Carboxypeptidase A

[0244] 500 μL samples of 0.01 mg/mL SEQ ID NO:3 and N-CBZ-Glycine-Glycine-Leucine (Z-Gly-Gly-Leu; Sigma-Aldrich, C8501; postive control) were prepared in the carboxypeptidase A reaction buffer (25 mM Tris-HCl, 500 mM NaCl, pH 7.5) in 2 mL eppendorf tubes. Five (5) μL of a 40 μg/mL carboxypeptidase inhibitor (carboxypeptidase inhibitor from potato tuber (Sigma-Aldrich, C0279) stock was added to each control sample (0 and 24 h), for a final concentration of 0.4 μg/mL. All control and test (0, 3 and 24 h) samples were incubated at 37° C. for 5 min. Twenty (20) μL of a 0.01 mg/mL carboxypeptidase A (Carboxypeptidase A from human pancreas; Sigma-Aldrich, C5358) stock was added to each sample. The samples were returned to the 37° C. water bath. The reaction was quenched with 5 μL of a 40 μg/mL carboxypeptidase inhibitor at the proper time point. No extra carboxypeptidase inhibitor was added to the control samples since there was already inhibitor present. Samples were subsequently flash frozen in liquid nitrogen, and stored at −80° C. until analysis. Upon analysis, samples were thawed and transferred to a 1 mL 96-well deep microtiter plate. Standards of SEQ ID NO:3 and Z-Gly-Gly-Leu were prepared in carboxypeptidase A reaction buffer at 0.625, 1.25, 2.50, 5.00, and 10.00 μg/mL concentrations. These standards were used to generate a standard curve for quantification of samples. When necessary, the standard curves were also used to calculate the concentration of the corresponding digestion product. Ten (10) μL injections were made of each sample and standard. As shown in FIG. 13a, Z-Gly-Gly-Leu, was proteolyzed by carboxypeptidase A. The Z-Gly-Gly-Leu TO control and TO samples had average calculated concentrations of 7.1 (+/0.30) μg/mL. No precursor mass was detected in T3 h and T24 h samples. The calculated concentrations of the Z-Gly-Gly-Leu products for T3 h and T24 h samples were 2.2 (+/−0.10) μg/mL. As shown in FIG. 13b, some proteolysis of SEQ ID NO:3 was observed upon treatment with carboxypeptidase A. The SEQ ID NO:3 calculated concentrations of all samples were 8.4 (+/−1.2) μg/mL. For the SEQ. ID NO:3 time 0 control and time 0 samples the calculated concentrations for the SEQ ID NO:3 products were 0.8 (+/−0.02) μg/mL and 0.8 (+/−0.01) μg/mL, respectively. The T3 h and T24 h samples had average calculated SEQ ID NO:3 product concentrations of 1.3 (+/−0.06) 1g/mL and 1.3 (+/−0.04) μg/mL, respectively.

### Carboxypeptidase A—Identification of Proteolysis Product

[0245] To further study the SEQ ID NO:3 carboxypeptidase A digestion product, samples of 0.01 mg/mL SEQ ID NO:3 were prepared in the carboxypeptidase A reaction buffer at a total volume of 500 μL in 2 mL eppendorf tubes. Triplicate samples were prepared for the following time points: 0, 15, 30, 60, 120, 180 and 240 min. The samples were incubated at 37° C. for 5 min. Twenty (20) μL of a 0.01 mg/mL carboxypeptidase A stock were added to each sample and returned to the 37° C. water bath. The reactions were quenched with 5 μL of a 40 μg/mL carboxypeptidase inhibitor at the proper time points. Samples were subsequently flash frozen in liquid nitrogen, and stored at −80° C. until analysis. Upon analysis, samples were thawed and transferred to a 1 mL 96-well plate. Standards of SEQ ID NO:3 were prepared in carboxypeptidase A reaction buffer at 0.625, 1.25, 2.50, 5.00, and 10.00 μg/mL concentrations. These standards were used to generate a standard curve for quantification of samples. When necessary, the standard curves were also used to calculate the concentration of the corresponding digestion product. Ten (10) μL injections were made of each sample and standard. If the formation of a digestion product was evident, then a spectral analysis was used to determine the mass of the digestion product, and predict its possible identity. Direct comparison between the total ion current (TIC) chromatograms from digestion at time 0 min (T0) and 240 min (T240) revealed a peak at 3.3 min in the T240 chromatogram (upper panel, FIG. 13c) that was not present in the T0 chromatogram (lower panel, FIG. 13c). The retention time of SEQ ID NO:3 was 3.51 min. A spectral view of the 3.3 min peak indicates the mass of the digestion product is 1362 Da. The spectrum shows 3 singly charged species representing protonated, ammoniated, and sodiated ions with mass/charge (m/z) ratio of 1363 ([M+H]⁺), 1380 ([M+NH₄]⁺), 1385 ([M+Na]⁺) (FIG. 13d). The sum of the areas of all 3 adducts increased over time (FIG. 13e). A digestion product mass of 1362 Da corresponds to the loss of the carboxy-terminal tyrosine residue of (SEQ ID NO:6), the first expected product of carboxypeptidase A proteolysis. SEQ ID NO:6 is a peptide that corresponds to the proposed SEQ ID NO:3 carboxypeptidase A cleavage product (it is sequentially identical to SEQ ID NO:3 minus the carboxy-terminal tyrosine residue). This peptide was used as a standard to quantify digestion product formation. The increase in concentration of SEQ ID NO:6 was proportional to the disappearance of SEQ ID NO:3. Based on these findings, SEQ ID NO:6 appears to be the sole digestion product of SEQ ID NO:3 under these in vitro conditions. The SEQ ID NO:3 average concentration at T0 was 5115 (+/−121) nM. The concentration decreased with time, with the T240 average concentration calculated to be 4438 (+/−188) nM. The average concentration of SEQ ID NO:6 at T0 was 108 (+/−2) nM. The concentration increased with time, with the T240 average concentration calculated to be 726 (+/−138) niM. When comparing the rate of disappearance of SEQ ID NO:3 with the rate of formation of SEQ ID NO:6, both rates decreased at 60 min and leveled off at 120 min. In addition, the sum of the concentration of SEQ ID NO:3 and SEQ ID NO:6 remains essentially constant over the 4 h incubation. A graphical representation of the data is shown in FIG. 13f. The initial SEQ ID NO:3 concentration used was 5113 nM.

### Simulated Gastric Fluid (SGF)

[0246] Samples of 153 μg/mL SEQ ID NO:3 were prepared in the simulated gastric fluid buffer (0.2% NaCl (w/v), 0.7% HCl (v/v), pH 1) to a total volume of 500 μL in 2 mL eppendorf tubes. The reference control and test samples (0, 1 and 3 h) were incubated at 37° C. for the time point indicated. The reference control sample was diluted 10-fold (1000 μL volume) in distilled water for a final concentration of 10 μM and chilled on ice. At each time point, samples were diluted 10-fold (1000 μL volume) in distilled water for an expected concentration of 10 μM, and chilled on ice, until analysis. Upon analysis, samples were transferred to a 1 mL 96-well plate. Standards of SEQ ID NO:3 were prepared in distilled water at 0.625, 1.25, 2.50, 5.00, and 10.00 μM concentrations. These standards were used to generate a standard curve for quantification of samples. Ten (10) μL injections were made of each sample and standard.

[0247] Table III summarizes the results of SEQ ID NO:3 in vitro proteolytic stability experiments

| | Cleavage of SEQ ID |
|---|---|
| | NO: 3 by proteolytic |
| Proteolytic substance | substance |
| Chymotrypsin | not detectable |
| Pepsin | not detectable |
| Aminopeptidase | not detectable |
| Carboxypetidase A | Yes |
| Simulated gastric fluid | not detectable |

### Example 8

### SEQ ID NO:3 Results in an Increase in Bristol Stool Form Scale Scores for Consistency of Bowel Movements in Humans after a Single Dose

[0248] Single doses of 30, 100, 300, 1000 or 3000 μg of chemically synthesized SEQ ID NO:3 were given to 30 healthy males and postmenopausal females. At each dose level (100 μg was done twice) SEQ ID NO:3 or placebo (vehicle) was administered orally in 5.0 mL 50 mM phosphate buffer (pH 6.0) plus 3×20 mL water rinses and 175 mL water after at least a 10-hour fast. In each dosing group, subjects were randomized to receive either placebo (1 subject) or SEQ ID NO:3 (3-4 subjects). Bowel habits (including Bristol Stool Form Scale score (BSFS; FIG. 14a), stool frequency, and stool weight) were evaluated for each collected bowel movement 48 hours prior to dose and up to approximately 48 hours postdose.

[0249] Administration of a single dose of SEQ ID NO:3 resulted in an increase in maximum BSFS score FIG. 14b). Higher BSFS post-dose scores correlated with a higher dose of the SEQ ID NO:3. FIG. 14c shows the percent of subjects with at least a 2-point increase in BSFS consistency score (mean pre-dose compared to peak 48 hours post-dose). The highest percent of subjects with a 2-point or greater increase in BSFS score are found in the 1000 μg dose group.

### Example 9

### SEQ ID NO:3 Alters the Consistency and Timing of Bowel Movements in Humans After a Seven-day Dosing Period

[0250] Seven daily doses of 30, 100, 300, or 1000 μg of chemically synthesized SEQ ID NO:3 were given to 48 healthy subjects. SEQ ID NO:3 or placebo (vehicle) was administered orally in 5.0 mL 50 mM phosphate buffer (pH 6.0) plus 3×20 mL water rinses and 175 mL water after at least a 10-hour fast. In each dosing group, 8 subjects were randomized to receive SEQ ID NO:3 and 4 subjects were randomized to receive placebo. FIG. 15a shows the daily mean BSFS scores for the different dosing groups the seven days prior to and the seven days during dosing with SEQ ID NO:3. FIG. 15b shows the Mean Stool Frequency (stools per week) for the subjects over the seven-day treatment period. An increase in Mean Stool Frequency score was observed with higher doses of SEQ ID NO:3. FIG. 15C shows the Mean Stool Weight (in grams) of the subjects' stools over the seven-day SEQ ID NO:3 dosing period. An increase in Mean Stool Weight was observed with higher doses of SEQ ID NO:3. The Mean Ease of Passage (FIG. 15d) of stools was tested for subjects treated with 30-1000 μg SEQ ID NO:3. In FIG. 15e, the 1000 μg dose group shows the greatest difference in baseline versus treatment values between placebo and SEQ ID NO:3 for Mean Ease of Passage of stools. FIG. 15F shows the mean time to first bowel movement for each of the different doses.

### Example 10

### SEQ ID NO:3 Effects in a Rat Model of Postoperative Ileus

[0251] Female CD rats were used to test the effect of SEQ ID NO:3 on delayed transit induced by abdominal surgery and manual manipulation of the small intestine. Groups of at least nine rats underwent abdominal surgery under isoflurane anesthesia. Surgery consisted of laparotomy and 5 minutes of gentle manual intestinal massage. Following recovery from anesthesia, rats were dosed orally with either 10 μg/kg SEQ ID NO:3 or vehicle (20 mM Tris) in a volume of 300 μl. 1 hour after dosing, intestinal transit rate was measured. Animals were again dosed with 300 μl of the test article followed immediately by 500 μl of a charcoal meal (10% charcoal, 10% gum arabic in water). To calculate the distance of the small intestine traveled by the charcoal front, after 20 minutes, the total length of the intestine as well as the distance traveled from the stomach to the charcoal front were measured for each animal. Animals dosed with 10 μg/kg SEQ ID NO:3 experienced an increase in transit following abdominal surgery compared to animals dosed with vehicle alone (FIG. 16). Charcoal transit in SEQ ID NO:3 dosed animals was measured at 37.3+3.0% (mean±SEM) of the small intestine compared with vehicle at 24.7+1.4% (mean±SEM) of the small intestine.

### Example 11

### SEQ ID NO:3 Effect on cGMP Levels and Secretion in Ligated Loops Rodent Models

[0252] The effect of SEQ ID NO:3 on cGMP levels and secretion were studied by injecting SEQ ID NO:3 directly into an isolated loop in either wild-type or GC-C KO nice. This was done by surgically ligating a loop in the small intestine of the mouse.

[0253] The methodology for ligated loop formation was a similar to that described in London et al. 1997 Am J Physiol p.G93-105. The loop was roughly centered and was a length of 1-3 cm. The loops were injected with 100 μl of either SEQ ID NO:3 (5 μg) or vehicle (20 mM Tris, pH 7.5 or Krebs Ringer, 10 mM Glucose, HEPES buffer (KRGH)). Following a recovery time of 90 minutes the loops were excised. Weights were recorded for each loop before and after removal of the fluid contained therein. The length of each loop was also recorded. A weight to length ratio (W/L) for each loop was calculated to determine the effects of SEQ ID NO:3 on secretion.

[0254] To determine the effect of SEQ ID NO:3 on cGMP activity, fluid from the loop was collected in ice-cold trichloracetic acid (TCA) and stored at −80° C. for use in an assay to measure cGMP levels in the fluid. Intestinal fluid samples were TCA extracted, and cyclic GMP was measured by EIA according to procedures outlined in the Cayman Chemical Cyclic GMP EIA kit (Cayman Chemical, Ann Arbor, Mich.) to determine cyclic GMP levels in the intestinal fluid of the mouse in the presence of either SEQ ID NO:3 or vehicle. FIG. 17a depicts the effects of SEQ ID NO:3 in wild-type and GC-C KO mice ligated loops with regards to cGMP activity and secretion (n=5-7 animal/group for secretion assays; n=4-7 animals/group for cGMP assays). In contrast to wild-type mice, SEQ ID NO:3 has no effect on cGMP activity or secretion in GC-C KO mice.

[0255] The effects of SEQ ID NO:3 on cGMP levels and secretion in ligated loops in female CD rats was also determined using protocols similar to those described above. In the case of the rat, however four loops of intestine were surgically ligated. The first three loops were distributed equally in the small intestine and the fourth loop was located in colon. Loops were 1 to 3 centimeters, and were injected with 200 μL of either SEQ ID NO:3 (5 μg) or vehicle (Krebs Ringer, 10 mM glucose, HEPES buffer (KRGH)). SEQ ID NO:3 increases cGMP levels and secretion in the center loop of the rat small intestine as shown in FIG. 17b (n=9-10 animal per group for secretion assays; n=7-8 animals for cGMP assays). Similar experiments were performed to determine the effect of SEQ ID NO:6 on cGMP levels and secretion in ligated loops in female CD rats. Experimental results comparing the effects of SEQ ID NO:3, SEQ ID NO:6 and vehicle only on secretion and cGMP production are shown in FIGS. 17c and 17d.

### Example 11

### SEQ ID NO:3 Effects on Opioid Induced Constipation

[0256] The effect of SEQ ID NO:3 on opioid induced constipation was studied by dosing female rats (˜160 g each) with 300 μl of the opiate, morphine (2.5 mg/kg) via intra-peritoneal injection. Thirty minutes post dosing, animals were treated with 300 μl of SEQ ID NO:3 or vehicle only. Ten minutes later, the animals were orally dosed with 500 μl 10% charcoal, 10% gum arabic meal. After ten minutes, the animals were sacrificed and gastrointestinal transit was measured as in Example 3 above. Experimental results are shown in FIG. 21.

### Example 13

### Mass Spectrometry Characterization of Disulfide Bonds in SEQ ID NO:3

[0257] The position of disulfide bonds in SEQ ID NO:3 was determined. To identify the optimal conditions required to partially reduce SEQ ID NO:3, chemically synthesized peptide was alkylated with iodoacetamide after TCEP (tris(2-carboxyethyl) phosphine) treatment (0.1 to 10 mM for 20 minutes at room temperature). After TCEP reduction, the reaction was adjusted to pH 8.0 with Tris and iodoacetaride was added to 50 mM. The reaction products were analyzed by LC-MS. 0.1 mM TCEP did not reduce SEQ ID NO:3 while 10 mM reduced all three disulfide bonds in the molecule. 1 mM TCEP resulted in a mixture of molecules containing native SEQ ID NO: 3, one reduced disulfide bond (3 species), two reduced disulfide bonds (3 species) and three reduced bonds (one species).

[0258] Partially reduced SEQ ID NO:3 was then cyanylated, cleaved with base and completely reduced to separate fragments. After partial reduction, cyanylation, and cleavage of SEQ ID NO:3 were performed either in a test tube or in an HPLC column, a modified method of Wu and Watson ((2002) Methods Mol. Biol. 194: 1-22) was used to determine the position of the disulfide bonds. The steps were carried out manually, with isolation of the alkylation products by solid phase extraction (SPE), or in-line (automated), with reactions occurring in an SPE column. Briefly, the manual procedure comprised the following. Chemically synthesized SEQ ID NO:3 (162 μg) was partially reduced with 1 mM tris(2-carboxyethyl) phosphine (TCEP) at pH 3. The sulfhydryl groups of partially reduced SEQ ID NO:3 were cyanylated with 2.1 μmoles 1-cyano-4-dimethylaamino-pyridinium tetrafluoroborate (CDAP) for 15 minutes. The reaction mixture was then diluted to 0.5 mL with 10 mM ammonium acetate pH 5.8 and applied to an Amprep octadecyl C18 minicolumn (100 mg, GE HealthTech). The minicolumn was washed with 1 mL of 10 mM ammonium acetate pH 5.8 and peptides eluted with 0.6 mL methanol. After drying, the peptides were cleaved in 1 M NH₄OH and fully reduced with 0.1 M TCEP. After drying, the peptide fragments were reconstituted in 0.1% formic acid and analyzed by LC-MS. Briefly, the automated procedure comprised the following. SEQ ID NO:3 (16.2 mg, 0.01 mmole) was loaded onto an Oasis HLB 2×15 mm column (Waters). Reactions were carried out by filling a 5 mL sample loop with 1.2 mM TCEP, 2.4 mM CDAP, 2 M NH₄OH or 6 mM TCEP and pushing each reagent through the column with 0.1% formic acid in 5% methanol at a flow rate of 0.3 mL/min. The column was then back-flushed and the cleaved peptides analyzed by LC-MS.

[0259] LC-MS procedures comprised the following. An Atlantis dC18 2.1×50 mm column (Waters) equilibrated in 98% buffer A (0.1% formic acid), 2% buffer B (0.1% formic acid: 85% methanol, 15% CH3CN) at a flow rate of 0.3 mL/min. After a 4 min wash with the same buffers, peptides were eluted with a linear gradient of 2% buffer B to 40% buffer B over 38 min with a constant flow rate of 0.3 mL/min. Cleaved peptide masses were determined using a Micromass Q-T of II instrument equipped with an electrospray ionization (ESI) source operating in positive ion mode. The instrument was programmed to scan in the mass range of m/z 100 to 1000. Molecular weight predictions and data analysis were carried out with MassLynx version 4.0 software. NMR analysis of SEQ ID NO:3 was performed. Briefly, SEQ ID NO:3 was dissolved at 7.5 mg/mL in D2O (pD of 5 adjusted with NaOD). Nuclear Overhauser Enhancement Spectioscopy (NOESY) spectrum was acquired at 500 MHz. NOE-based distance restraints were collected from the NOESY spectra. The peptide structure was determined using the programs. Based on the method of Wu and Watson (supra), a list of possible fragments resulting from CN-induced cleavage of singly reduced and cyanylated species of SEQ ID NO:3 with all possible disulfide linkage combinations was generated. The list included the signature fragments for each possible structure. FIG. 22 is a table which presents a list of the observed fragments of SEQ ID NO:3 after partial reduction, cyanylation, and cleavage. These results indicate that the disulfide structure of SEQ ID NO:3 is Cys1-Cy6, Cys2-Cys10, and Cys5-Cys13.

### Example 14

### Diuresis and Naturesis Assays

[0260] Effect on Diuresis and Natriuresis

[0261] The effect of polypeptides/GC-agonists described herein on diuresis and natriuresis can be determined using methodology similar to that described in WO06/001931 (examples 6 (p. 42) and 8 (p. 45)). Briefly, the polypeptide/agonist described herein (180-pmol) is infused for 60 min into a group of 5 anesthetized rats. Given an estimated rat plasma volume of 10 mL, the infusion rate is approximately 3 pmol/mL/min. Blood pressure, urine production, and sodium excretion are monitored for approximately 40 minutes prior to the infusion, during the infusion, and for approximately 50 minutes after the infusion to measure the effect of the polypeptide/GC-C agonist on diuresis and natriuresis. For comparison, a control group of five rats is infused with regular saline. Urine and sodium excretion can be assessed. Dose response can also be determined polypeptide/GC-C agonist described herein is infused intravenously into rats over 60 minutes. Urine is collected at 30 minute intervals up to 180 minutes after termination of polypeptide/GC-C agonist infusion, and urine volume, sodium excretion, and potassium excretion are determined for each collection interval. Blood pressure is monitored continuously. For each dose a dose-response relationship for urine volume, sodium and potassium excretion can be determined. Plasma concentration of the polypeptide/GC-agonist is also determined before and after iv infusion.

[0262] Rat Diuresis Experiment:

[0263] Female Sprague-Dawley rats (>170g, 2-8 per group) are given 3.0 mL of iosotonic saline perorally, and then anesthetized with isoflurane/oxygen. Once an appropriate level of anesthesia has been achieved, a sterile polyurethane catheter (−16 cm, 0.6 mm ID, 0.9 mm OD) is inserted 1.5-2.0 cm into the urethra and secured using 1-2 drops of veterinary bond adhesive applied to urethra/catheter junction. Rats are then dosed with either vehicle or test article via the intravenous or intraperitoneal route. Rats are then placed in appropriately sized rat restraint tubes, with the catheter protruding out of the restraint tube into a 10 mL graduated cylinder. Rats are allowed to regain consciousness, and the volume of urine excreted over a 1-5 hour duration is recorded periodically for each rat.

### Administration of Peptides and GC-C Receptor Agonists

[0264] For treatment of gastrointestinal disorders, the peptides and agonists described herein are preferably administered orally, e.g., as a tablet or cachet containing a predetermined amount of the active ingredient, pellet, gel, paste, syrup, bolus, electuary, slurry, sachet; capsule; powder; lyophilized powder; granules; as a solution or a suspension in an aqueous liquid or a non-aqueous liquid; as an oil-in-water liquid emulsion or a water-in-oil liquid emulsion, via a liposomal formulation (see, e.g., EP 736299) or in some other form. Orally administered compositions can include binders, lubricants, inert diluents, lubricating, surface active or dispersing agents, flavoring agents, and humectants. Orally administered formulations such as tablets may optionally be coated or scored and may be formulated so as to provide sustained, delayed or controlled release of the active ingredient therein. The peptides and agonists can be co-administered with other agents used to treat gastrointestinal disorders including but not limited to the agents described herein. The peptides and agonists can also be administered by rectal suppository. For the treatment of disorders outside the gastrointestinal tract such as congestive heart failure and benign prostatic hypertrophy, peptides and agonists are preferably administered parenterally or orally.

[0265] The peptides described herein can be administered alone or in combination with other agents. For example, the peptides can be administered together with an analgesic peptide or compound. The analgesic peptide or compound can be covalently attached to a peptide described herein or it can be a separate agent that is administered together with or sequentially with a peptide described herein in a combination therapy.

[0266] Combination therapy can be achieved by administering two or more agents, e.g., a peptide described herein and an analgesic peptide or compound, each of which is formulated and administered separately, or by administering two or more agents in a single formulation. Other combinations are also encompassed by combination therapy. For example, two agents can be formulated together and administered in conjunction with a separate formulation containing a third agent. While the two or more agents in the combination therapy can be administered simultaneously, they need not be. For example, administration of a first agent (or combination of agents) can precede administration of a second agent (or combination of agents) by minutes, hours, days, or weeks. Thus, the two or more agents can be administered within minutes of each other or within 1, 2, 3, 6, 9, 12, 15, 18, or 24 hours of each other or within 1, 2, 3, 4, 5, 6, 7, 8, 9, 10, 12, 14 days of each other or within 2, 3, 4, 5, 6, 7, 8, 9, or 10 weeks of each other. In some cases even longer intervals are possible. While in many cases it is desirable that the two or more agents used in a combination therapy be present in within the patient's body at the same time, this need not be so.

[0267] Combination therapy can also include two or more administrations of one or more of the agents used in the combination. For example, if agent X and agent Y are used in a combination, one could administer them sequentially in any combination one or more times, e.g., in the order X-Y-X, X-X-Y, Y-X-Y, Y-Y-X, X-X-Y-Y, etc.

[0268] Combination therapy can also include the administration of two or more agents via different routes or locations. For example, (a) one agent is administered orally and another agents is administered intravenously or (b) one agent is administered orally and another is administered locally. In each case, the agents can either simultaneously or sequentially. Approximated dosages for some of the combination therapy agents described herein are found in the “BNF Recommended Dose” column of tables on pages 11-17 of WO01/76632 (the data in the tables being attributed to the March 2000 British National Formulary) and can also be found in other standard formularies and other drug prescribing directories. For some drugs, the customary presecribed dose for an indication will vary somewhat from country to country.

[0269] The agents, alone or in combination, can be combined with any pharmaceutically acceptable carrier or medium. Thus, they can be combined with materials that do not produce an adverse, allergic or otherwise unwanted reaction when administered to a patient. The carriers or mediums used can include solvents, dispersants, coatings, absorption promoting agents, controlled release agents, and one or more inert excipients (which include starches, polyols, granulating agents, microcrystalline cellulose (e.g. celphere, Celphere beads®), diluents, lubricants, binders, disintegrating agents, and the like), etc. If desired, tablet dosages of the disclosed compositions may be coated by standard aqueous or nonaqueous techniques.

[0270] Compositions of the present invention may also optionally include other therapeutic ingredients, anti-caking agents, preservatives, sweetening agents, colorants, flavors, desiccants, plasticizers, dyes, glidants, anti-adherents, anti-static agents, surfactants (wetting agents), anti-oxidants, film-coating agents, and the like. Any such optional ingredient must be compatible with the compound described herein to insure the stability of the formulation.

[0271] The composition may contain other additives as needed, including for example lactose, glucose, fructose, galactose, trehalose, sucrose, maltose, raffinose, maltitol, melezitose, stachyose, lactitol, palatinite, starch, xylitol, mannitol, myoinositol, and the like, and hydrates thereof, and amino acids, for example alanine, glycine and betaine, and peptides and proteins, for example albumen.

[0272] Examples of excipients for use as the pharmaceutically acceptable carriers and the pharmaceutically acceptable inert carriers and the aforementioned additional ingredients include, but are not limited to binders, fillers, disintegrants, lubricants, anti-microbial agents, and coating agents such as:

BINDERS: corn starch, potato starch, other starches, gelatin, natural and synthetic gums such as acacia, xanthan, sodium alginate, alginic acid, other alginates, powdered tragacanth, guar gurn, cellulose and its derivatives (e.g., ethyl cellulose, cellulose acetate, carboxymethyl cellulose calcium, sodium carboxymethyl cellulose), polyvinyl pyrrolidone (e.g., povidone, crospovidone, copovidone, etc), methyl cellulose, Methocel, pre-gelatinized starch (e.g., STARCH 1500® and STARCH 1500 LM®, sold by Colorcon, Ltd.), hydroxypropyl methyl cellulose microcrystalline cellulose (e.g. AVICEL™, such as, AVICEL-PH-101™, 103™ and 105™, sold by FMC Corporation, Marcus Hook, Pa., USA), or mixtures thereof,
FILLERS: talc, calcium carbonate (e.g., granules or powder), dibasic calcium phosphate, tribasic calcium phosphate, calcium sulfate (e.g., granules or powder), microcrystalline cellulose, powdered cellulose, dextrates, kaolin, mannitol, silicic acid, sorbitol, starch, pre-gelatinized starch, dextrose, fructose, honey, lactose anhydrate, lactose monohydrate, lactose and aspartame, lactose and cellulose, lactose and microcrystalline cellulose, maltodextrin, maltose, mannitol, microcrystalline cellulose & guar gum, molasses, sucrose, or mixtures thereof,
DISINTEGRANTS: agar-agar, alginic acid, calcium carbonate, microcrystalline cellulose, croscarmellose sodium, crospovidone, polacrilin potassium, sodium starch glycolate, potato or tapioca starch, other starches, pre-gelatinized starch, clays, other algins, other celluloses, gums (like gellan), low-substituted hydroxypropyl cellulose, or mixtures thereof,
LUBRICANTS: calcium stearate, magnesium stearate, mineral oil, light mineral oil, glycerin, sorbitol, mannitol, polyethylene glycol, other glycols, stearic acid, sodium lauryl sulfate, sodium stearyl fumarate, vegetable based fatty acids lubricant, talc, hydrogenated vegetable oil (e.g., peanut oil, cottonseed oil, sunflower oil, sesame oil, olive oil, corn oil and soybean oil), zinc stearate, ethyl oleate, ethyl laurate, agar, syloid silica gel (AEROSIL 200, W.R. Grace Co., Baltimore, Md. USA), a coagulated aerosol of synthetic silica (Deaussa Co., Plano, Tex. USA), a pyrogenic silicon dioxide (CAB-O-SIL, Cabot Co., Boston, Mass. USA), or mixtures thereof,
ANTI-CAKING AGENTS: calcium silicate, magnesium silicate, silicon dioxide, colloidal silicon dioxide, talc, or mixtures thereof,
ANTIMICROBIAL AGENTS: benzalkonium chloride, benzethonium chloride, benzoic acid, benzyl alcohol, butyl paraben, cetylpyridinium chloride, cresol, chlorobutanol, dehydroacetic acid, ethylparaben, methylparaben, phenol, phenylethyl alcohol, phenoxyethanol, phenylmercuric acetate, phenylmercuric nitrate, potassium sorbate, propylparaben, sodium benzoate, sodium dehydroacetate, sodium propionate, sorbic acid, thimersol, thymo, or mixtures thereof, and
COATING AGENTS: sodium carboxymethyl cellulose, cellulose acetate phthalate, ethylcellulose, gelatin, pharmaceutical glaze, hydroxypropyl cellulose, hydroxypropyl methylcellulose (hypromellose), hydroxypropyl methyl cellulose phthalate, methylcellulose, polyethylene glycol, polyvinyl acetate phthalate, shellac, sucrose, titanium dioxide, carnauba wax, microcrystalline wax, gellan gum, maltodextrin, methacrylates, microcrystalline cellulose and carrageenan or mixtures thereof.

[0273] The formulation can also include other excipients and categories thereof including but not limited to L-histidine, Pluronic®, Poloxamers (such as Lutrol® and Poloxamer 188), ascorbic acid, glutatbione, permeability enhancers (e.g. lipids, sodium cholate, acylcarnitine, salicylates, mixed bile salts, fatty acid micelles, chelators, fatty acid, surfactants, medium chain glycerides), protease inhibitors (e.g. soybean trypsin inhibitor, organic acids), pH lowering agents and absorption enhancers effective to promote bioavailability (including but not limited to those described in U.S. Pat. No. 6,086,918 and U.S. Pat. No. 5,912,014), creams and lotions (like maltodextrin and carrageenans); materials for chewable tablets (like dextrose, fructose, lactose monohydrate, lactose and aspartame, lactose and cellulose, maltodextrin, maltose, mannitol, inicrocrystalline cellulose and guar gum, sorbitol crystalline); parenterals (like mannitol and povidone); plasticizers (like dibutyl sebacate, plasticizers for coatings, polyvinylacetate phthalate); powder lubricants (like glyceryl behenate); soft gelatin capsules (like sorbitol special solution); spheres for coating (like sugar spheres); spheronization agents (like glyceryl behenate and microcrystalline cellulose); suspending/gelling agents (like carrageenan, gellan gum, mannitol, microcrystalline cellulose, povidone, sodium starch glycolate, xanthan gum); sweeteners (like aspartame, aspartame and lactose, dextrose, fructose, honey, maltodextrin, maltose, mannitol, molasses, sorbitol crystalline, sorbitol special solution, sucrose); wet granulation agents (like calcium carbonate, lactose anhydrous, lactose monohydrate, maltodextrin, mannitol, microcrystalline cellulose, povidone, starch), caramel, carboxymethylcellulose sodium, cherry cream flavor and cherry flavor, citric acid anhydrous, citric acid, confectioner's sugar, D&C Red No. 33, D&C Yellow #10 Aluminum Lake, disodium edetate, ethyl alcohol 15%, FD&C Yellow No. 6 aluminum lake, FD&C Blue #1 Aluminum Lake, FD&C Blue No. 1, FD&C blue no. 2 aluminum lake, FD&C Green No. 3, FD&C Red No. 40, FD&C Yellow No. 6 Aluminum Lake, FD&C Yellow No. 6, FD&C Yellow No. 10, glycerol palmitostearate, glyceryl monostearate, indigo carmine, lecithin, manitol, methyl and propyl parabens, mono ammonium glycyrrhizinate, natural and artificial orange flavor, pharmaceutical glaze, poloxamer 188, Polydextrose, polysorbate 20, polysorbate 80, polyvidone, pregelatinized corn starch, pregelatinized starch, red iron oxide, saccharin sodium, sodium carboxymethyl ether, sodium chloride, sodium citrate, sodium phosphate, strawberry flavor, synthetic black iron oxide, synthetic red iron oxide, titanium dioxide, and white wax.

[0274] Solid oral dosage forms may optionally be treated with coating systems (e.g. Opadry® fx film coating system, for example Opadry® blue (OY-LS-20921), Opadry®, white (YS-2-7063), Opadry® white (YS-1-7040), and black ink (S-1-8106).

[0275] The agents either in their free form or as a salt can be combined with a polymer such as polylactic-glycoloic acid (PLGA), poly-(I)-lactic-glycolic-tartaric acid (P(I) LGT) (WO 01/12233), polyglycolic acid (U.S. Pat. No. 3,773,919), polylactic acid (U.S. Pat. No. 4,767,628), poly(ε-caprolactone) and poly(alkylene oxide) (U.S. 20030068384) to create a sustained release formulation. Such formulations can be used to implants that release a peptide or another agent over a period of a few days, a few weeks or several months depending on the polymer, the particle size of the polymer, and the size of the implant (see, e.g., U.S. Pat. No. 6,620,422). Other sustained release formulations and polymers for use in are described in EP 0 467 389 A2, WO 93/24150, U.S. Pat. No. 5,612,052, WO 97/40085, WO 03/075887, WO 01/01964A2, U.S. Pat. No. 5,922,356, WO 94/155587, WO 02/074247A2, WO 98/25642, U.S. Pat. No. 5,968,895, U.S. Pat. No. 6,180,608, U.S. 20030171296, U.S. 20020176841, U.S. Pat. No. 5,672,659, U.S. Pat. No. 5,893,985, U.S. Pat. No. 5,134,122, U.S. Pat. No. 5,192,741, U.S. Pat. No. 5,192,741, U.S. Pat. No. 4,668,506, U.S. Pat. No. 4,713,244, U.S. Pat. No. 5,445,832 U.S. Pat. No. 4,931,279, U.S. Pat. No. 5,980,945, WO 02/058672, WO 9726015, WO 97/04744, and US20020019446. In such sustained release formulations microparticles (Delie and Blanco-Prieto 2005 Molecule 10:65-80) of peptide are combined with microparticles of polymer. One or more sustained release implants can be placed in the large intestine, the small intestine or both. U.S. Pat. No. 6,011,011 and WO 94/06452 describe a sustained release formulation providing either polyethylene glycols (i.e. PEG 300 and PEG 400) or triacetin. WO 03/053401 describes a formulation which may both enhance bioavailability and provide controlled release of the agent within the GI tract. Additional controlled release formulations are described in U.S. Pat. No. 6,734,188, WO 02/38129, EP 326 151, U.S. Pat. No. 5,236,704, WO 02/30398, WO 98/13029; U.S. 20030064105, U.S. 20030138488A1, U.S. 20030216307A1, U.S. Pat. No. 6,667,060, WO 01/49249, WO 01/49311, WO 01/49249, WO 01/49311, and U.S. Pat. No. 5,877,224.

[0276] The agents can be administered, e.g., by intravenous injection, intramuscular injection, subcutaneous injection, intraperitoneal injection, topical, sublingual, intraarticular (in the joints), intradermal, buccal, ophthalmic (including intraocular), intranasaly (including using a cannula), intraspinally, intrathecally, or by other routes. The agents can be administered orally, e.g., as a tablet or cachet containing a predetermined amount of the active ingredient, gel, pellet, paste, syrup, bolus, electuary, slurry, capsule, powder, lyophilized powder, granules, sachet, as a solution or a suspension in an aqueous liquid or a non-aqueous liquid, as an oil-in-water liquid emulsion or a water-in-oil liquid emulsion, via a micellar formulation (see, e.g: WO 97/11682) via a liposomal formulation (see, e.g., EP 736299,WO 99/59550 and WO 97/13500), via formulations described in WO 03/094886, via bilosome (bile-salt based vesicular system), via a dendrimer, or in some other form. Orally administered compositions can include binders, lubricants, inert diluents, lubricating, surface active or dispersing agents, flavoring agents, and humectants. Orally administered formulations such as tablets may optionally be coated or scored and may be formulated so as to provide sustained, delayed or controlled release of the active ingredient therein. The agents can also be administered transdermally (i.e. via reservoir-type or matrix-type patches, microneedles, thermal poration, hypodermic needles, iontophoresis, electroporation, ultrasound or other forms of sonophoresis, jet injection, or a combination of any of the preceding methods (Prausnitz et al. 2004, Nature Reviews Drug Discovery 3:115-124)). The agents can be administered using high-velocity transdermal particle injection techniques using the hydrogel particle formulation described in U.S. 20020061336. Additional particle formulations are described in WO 00/45792, WO 00/53160, and WO 02/19989. An example of a transdermal formulation containing plaster and the absorption promoter dimethylisosorbide can be found in WO 89/04179. WO 96/11705 provides formulations suitable for transdermal administration. The agents can be administered in the form a suppository or by other vaginal or rectal means. The agents can be administered in a transmembrane formulation as described in WO 90/07923. The agents can be administed non-invasively via the dehydrated particles described in U.S. Pat. No. 6,485,706. The agent can be administered in an enteric-coated drug formulation as described in WO 02/49621. The agents can be administered intranassaly using the formulation described in U.S. Pat. No. 5,179,079. Formulations suitable for parenteral injection are described in WO 00/62759. The agents can be administered using the casein formulation described in U.S. 20030206939 and WO 00/06108. The agents can be administered using the particulate formulations described in U.S. 20020034536.

[0277] The agents, alone or in combination with other suitable components, can be administered by pulmonary route utilizing several techniques including but not limited to intratracheal instillation (delivery of solution into the lungs by syringe), intratracheal delivery of liposomes, insufflation (administration of powder formulation by syringe or any other similar device into the lungs) and aerosol inhalation. Aerosols (e.g., jet or ultrasonic nebulizers, metered-dose inhalers (MDIs), and dry-powder inhalers (DPIs)) can also be used in intranasal applications. Aerosol formulations are stable dispersions or suspensions of solid material and liquid droplets in a gaseous medium and can be placed into pressurized acceptable propellants, such as hydrofluoroalkanes (HFAs, i.e, HFA-134a and HFA-227, or a mixture thereof), dichlorodifluoromethane (or other chlorofluocarbon propellants such as a mixture of Propellants 11, 12, and/or 114), propane, nitrogen, and the like. Pulmonary formulations may include permeation enhancers such as fatty acids, saccharides, chelating agents, enzyme inhibitors (e.g., protease inhibitors), adjuvants (e.g., glycocholate, surfactin, span 85, and nafarnostat), preservatives (e.g., benzalkonium chloride or chlorobutanol), and ethanol (normally up to 5% but possibly up to 20%, by weight). Ethanol is commonly included in aerosol compositions as it can improve the function of the metering valve and in some cases also improve the stability of the dispersion. Pulmonary formulations may also include surfactants which include but are not limited to bile salts and those described in U.S. Pat. No. 6,524,557 and references therein. The surfactants described in U.S. Pat. No. 6,524,557, e.g., a C8-C16 fatty acid salt, a bile salt, a phospholipid, or alkyl saccaride are advantageous in that some of them also reportedly enhance absorption of the peptide in the formulation. Also suitable in the invention are dry powder formulations comprising a therapeutically effective amount of active compound blended with an appropriate carrier and adapted for use in connection with a dry-powder inhaler. Absorption enhancers which can be added to dry powder formulations of the present invention include those described in U.S. Pat. No. 6,632,456. WO 02/080884 describes new methods for the surface modification of powders. Aerosol formulations may include U.S. Pat. No. 5,230,884, U.S. Pat. No. 5,292,499, WO 017/8694, WO 01/78696, U.S. 2003019437, U.S. 20030165436, and WO 96/40089 (which includes vegetable oil). Sustained release formulations suitable for inhalation are described in U.s. 20010036481A1, 20030232019A1, and U.S. 20040018243A1 as well as in WO 01/13891, WO 02/067902, WO 03/072080, and WO 03/079885. Pulmonary formulations containing microparticles are described in WO 03/015750, U.S. 20030008013, and WO 00/00176. Pulmonary formulations containing stable glassy state powder are described in U.S. 20020141945 and U.S. Pat. No. 6,309,671. Other aerosol formulations are described in EP 1338272A1 WO 90/09781, U.S. Pat. No. 5,348,730, U.S. Pat. No. 6,436,367, WO 91/0401 1, and U.S. Pat. No. 6,294,153 and U.S. Pat. No. 6,290,987 describes a liposomal based formulation that can be administered via aerosol or other means. Powder formulations for inhalation are described in U.S. 20030053960 and WO 01/60341. The agents can be administered intranasally as described in U.S. 20010038824. The agents can be incorporated into microemulsions, which generally are thermodynamically stable, isotropically clear dispersions of two immiscible liquids, such as oil and water, stabilized by an interfacial film of surfactant molecules (Encyclopedia of Pharmaceutical Technology (New York: Marcel Dekker, 1992), volume 9). For the preparation of microemulsions, surfactant (emulsifier), co-surfactant (co-emulsifier), an oil phase and a water phase are necessary. Suitable surfactants include any surfactants that are useful in the preparation of emulsions, e.g., emulsifiers that are typically used in the preparation of creams. The co-surfactant (or “co-emulsifer”) is generally selected from the group of polyglycerol derivatives, glycerol derivatives and fatty alcohols. Preferred emulsifier/co-emulsifier combinations are generally although not necessarily selected from the group consisting of: glyceryl monostearate and polyoxyethylene stearate; polyethylene glycol and ethylene glycol palmitostearate; and caprilic and capric triglycerides and oleoyl macrogolglycerides. The water phase includes not only water but also, typically, buffers, glucose, propylene glycol, polyethylene glycols, preferably lower molecular weight polyethylene glycols (e.g., PEG 300 and PEG 400), and/or glycerol, and the like, while the oil phase will generally comprise, for example, fatty acid esters, modified vegetable oils, silicone oils, mixtures of mono- di- and triglycerides, mono- and di-esters of PEG (e.g., oleoyl macrogol glycerides), etc.

[0278] The agents described herein can be incorporated into pharmaceutically-acceptable nanoparticle, nanosphere, and nanocapsule formulations (Delie and Blanco-Prieto 2005 Molecule 10:65-80). Nanocapsules can generally entrap compounds in a stable and reproducible way (Henry-Michelland et al., 1987; Quintanar-Guerrero et al., 1998; Douglas et al., 1987). To avoid side effects due to intracellular polymeric overloading, ultrafine particles (sized around 0.1 μm) can be designed using polymers able to be degraded in vivo (e.g. biodegradable polyalkyl-cyanoacrylate nanoparticles). Such particles are described in the prior art (Couvreur et al, 1980; 1988; zur Muhlen et al., 1998; Zambaux et al. 1998; Pinto-Alphandry et al., 1995 and U.S. Pat. No. 5,145,684).

[0279] The agents described herein can be formulated with pH sensitive materials which may include those described in WO04041195 (including the seal and enteric coating described therein) and pH-sensitive coatings that achieve delivery in the colon including those described in U.S. Pat. No. 4,910,021 and WO9001329. U.S. Pat. No. 4,910,021 describes using a pH-sensitive material to coat a capsule. WO9001329 describes using pH-sensitive coatings on beads containing acid, where the acid in the bead core prolongs dissolution of the pH-sensitive coating. U.S. Pat. No. 5,175,003 discloses a dual mechanism polymer mixture composed of pH-sensitive enteric materials and film-forming plasticizers capable of conferring permeability to the enteric material, for use in drug-delivery systems; a matrix pellet composed of a dual mechanism polymer mixture permeated with a drug and sometimes covering a pharmaceutically neutral nucleus; a membrane-coated pellet comprising a matrix pellet coated with a dual mechanism polymer mixture envelope of the same or different composition; and a pharmaceutical dosage form containing matrix pellets. The matrix pellet releases acid-soluble drugs by diffusion in acid pH and by disintegration at pH levels of nominally about 5.0 or higher. The agents described herein may be formulated in the pH triggered targeted control release systems described in WO04052339. The agents described herein may be formulated according to the methodology described in any of WO03105812 (extruded hyrdratable polymers); WO0243767 (enzyme cleavable membrane translocators); WO03007913 and WO03086297 (mucoadhesive systems); WO02072075 (bilayer laminated formulation comprising pH lowering agent and absorption enhancer); WO04064769 (amidated peptides); WO05063156 (solid lipid suspension with pseudotropic and/or thixotropic properties upon melting); WO03035029 and WO03035041 (erodible, gastric retentive dosage forms); U.S. Pat. No. 5,007,790 and U.S. Pat. No. 5,972,389 (sustained release dosage forms); WO04112711 (oral extended release compositions); WO05027878, WO02072033, and WO02072034 (delayed release compositions with natural or synthetic gum); WO05030182 (controlled release formulations with an ascending rate of release); WO05048998 (microencapsulation system); U.S. Pat. No. 5,952,314 (biopolymer); U.S. Pat. No. 5,108,758 (glassy amylose matrix delivery); U.S. Pat. No. 5,840,860 (modified starch based delivery). JP 10324642 (delivery system comprising chitosan and gastric resistant material such as wheat gliadin or zein); U.S. Pat. No. 5,866,619 and U.S. Pat. No. 6,368,629 (saccharide containing polymer); U.S. Pat. No. 6,531,152 (describes a drug delivery system containing a water soluble core (Ca pectinate or other water-insoluble polymers) and outer coat which bursts (eg hydrophobic polymer-Eudragrit)); U.S. Pat. No. 6,234,464; U.S. Pat. No. 6,403,130 (coating with polymer containing casein and high methoxy pectin; WO0174175 (Maillard reaction product); WO05063206 (solubility increasing formulation); WO04019872 (transferring fusion proteins). The agents described herein may be formulated using gastrointestinal retention system technology (GIRES; Merrion Pharmaceuticals). GIRES comprises a controlled-release dosage form inside an inflatable pouch, which is placed in a drug capsule for oral administration. Upon dissolution of the capsule, a gas-generating system inflates the pouch in the stomach where it is retained for 16-24 hours, all the time releasing agents described herein.

[0280] The agents described herein can be formulated in an osmotic device including the ones disclosed in U.S. Pat. No. 4,503,030, U.S. Pat. No. 5,609,590 and U.S. Pat. No. 5,358,502. U.S. Pat. No. 4,503,030 discloses an osmotic device for dispensing a drug to certain pH regions of the gastrointestinal tract. More particularly, the invention relates to an osmotic device comprising a wall formed of a semi-permeable pH sensitive composition that surrounds a compartment containing a drug, with a passageway through the wall connecting the exterior of the device with the compartment. The device delivers the drug at a controlled rate in the region of the gastrointestinal tract having a pH of less than 3.5, and the device self- destructs and releases all its drug in the region of the gastrointestinal tract having a pH greater than 3.5, thereby providing total availability for drug absorption. U.S. Pat. Nos. 5,609,590 and 5,358,502 disclose an osmotic bursting device for dispensing a beneficial agent to an aqueous environment. The device comprises a beneficial agent and osmagent surrounded at least in part by a semi-permeable membrane. The beneficial agent may also function as the osmagent. The semi-permeable membrane is permeable to water and substantially impermeable to the beneficial agent and osmagent. A trigger means is attached to the semi-permeable membrane (e.g., joins two capsule halves). The trigger means is activated by a pH of from 3 to 9 and triggers the eventual, but sudden, delivery of the beneficial agent. These devices enable the pH-triggered release of the beneficial agent core as a bolus by osmotic bursting.

[0281] The agents described herein may be formulated based on the invention described in U.S. Pat. No. 5,316,774 which discloses a composition for the controlled release of an active substance comprising a polymeric particle matrix, where each particle defines a network of internal pores. The active substance is entrapped within the pore network together with a blocking agent having physical and chemical characteristics selected to modify the release rate of the active substance from the internal pore network. In one embodiment, drugs may be selectively delivered to the intestines using an enteric material as the blocking agent. The enteric material remains intact in the stomach but degrades under the pH conditions of the intestines. In another embodiment, the sustained release formulation employs a blocking agent, which remains stable under the expected conditions of the environment to which the active substance is to be released. The use of pH-sensitive materials alone to achieve site-specific delivery is difficult because of leaking of the beneficial agent prior to the release site or desired delivery time and it is difficult to achieve long time lags before release of the active ingredient after exposure to high pH (because of rapid dissolution or degradation of the pH-sensitive materials).

[0282] The agents may also be formulated in a hybrid system which combines pH-sensitive materials and osmotic delivery systems. These hybrid devices provide delayed initiation of sustained-release of the beneficial agent. In one device a pH-sensitive matrix or coating dissolves releasing osmotic devices that provide sustained release of the beneficial agent see U.S. Pat. Nos. 4,578,075, 4,681,583, and 4,851,231. A second device consists of a semipermeable coating made of a polymer blend of an insoluble and a pH-sensitive material. As the pH increases, the permeability of the coating increases, increasing the rate of release of beneficial agent see U.S. Pat. Nos. 4,096,238, 4,503,030, 4,522,625, and 4,587,117.

[0283] The agents described herein may be formulated in terpolumers according to U.S. Pat. No. 5,484,610 which discloses terpolymers which are sensitive to pH and temperature which are useful carriers for conducting bioactive agents through the gastric juices of the stomach in a protected form. The terpolymers swell at the higher physiologic pH of the intestinal tract causing release of the bioactive agents into the intestine. The terpolymers are linear and are made up of 35 to 99 wt % of a temperature sensitive component, which imparts to the terpolymer LCST (lower critical solution temperature) properties below body temperatures, 1 to 30 wt % of a pH sensitive component having a pKa in the range of from 2 to 8 which functions through ionization or deionization of carboxylic acid groups to prevent the bioactive agent from being lost at low pH but allows bioactive agent release at physiological pH of about 7.4 and a hydrophobic component which stabilizes the LCST below body temperatures and compensates for bioactive agent effects on the terpolymers. The terpolymers provide for safe bioactive agent loading, a simple procedure for dosage form fabrication and the terpolymer functions as a protective carrier in the acidic environment of the stomach and also protects the bioactive agents from digestive enzymes until the bioactive agent is released in the intestinal tract.

[0284] The agents described herein may be formulated in pH sensitive polymers according to those described in U.S. Pat. No. 6,103,865. U.S. Pat. No. 6,103,865 discloses pH-sensitive polymers containing sulfonamide groups, which can be changed in physical properties, such as swellability and solubility, depending on pH and which can be applied for a drug-delivery system, bio-material, sensor, and the like, and a preparation method therefore. The pH-sensitive polymers are prepared by introduction of sulfonamide groups, various in pKa, to hydrophilic groups of polymers either through coupling to the hydrophilic groups of polymers, such as acrylamide, N,N-dimethylacrylamide, acrylic acid, N-isopropylacrylamide and the like or copolymerization with other polymerizable monomers. These pH-sensitive polymers may have a structure of linear polymer, grafted copolymer, hydrogel or interpenetrating network polymer.

[0285] The agents described herein may be formulated according U.S. Pat. No. 5, 656, 292 which discloses a composition for pH dependent or pH regulated controlled release of active ingredients especially drugs. The composition consists of a compactable mixture of the active ingredient and starch molecules substituted with acetate and dicarboxylate residues. The preferred dicarboxylate acid is succinate. The average substitution degree of the acetate residue is at least 1 and 0.2-1. 2 for the dicarboxylate residue. The starch molecules can have the acetate and dicarboxylate residues attached to the same starch molecule backbone or attached to separate starch molecule backbones. The present invention also discloses methods for preparing said starch acetate dicarboxylates by transesterification or mixing of starch acetates and starch dicarboxylates respectively.

[0286] The agents described herein may be formulated according to the methods described in U.S. Pat. Nos. 5,554,147, 5,788,687, and 6,306,422 which disclose a method for the controlled release of a biologically active agent wherein the agent is released from a hydrophobic, pH-sensitive polymer matrix. The polymer matrix swells when the environment reaches pH 8.5, releasing the active agent. A polymer of hydrophobic and weakly acidic comonomers is disclosed for use in the controlled release system. Also disclosed is a specific embodiment in which the controlled release system may be used. The pH-sensitive polymer is coated onto a latex catheter used in ureteral catheterization. A ureteral catheter coated with a pH-sensitive polymer having an antibiotic or urease inhibitor trapped within its matrix will release the active agent when exposed to high pH urine.

[0287] The agents described herein may be formulated in/with bioadhesive polymers according to U.S. Pat. No. 6,365,187. Bioadhesive polymers in the form of, or as a coating on, microcapsules containing drugs or bioactive substances which may serve for therapeutic, or diagnostic purposes in diseases of the gastrointestinal tract, are described in U.S. Pat. No. 6,365,187. The polymeric nicrospheres all have a bioadhesive force of at least 11 mN/cm² (110 N/m2) Techniques for the fabrication of bioadhesive microspheres, as well as a method for measuring bioadhesive forces between microspheres and selected segments of the gastrointestinal tract in vitro are also described. This quantitative method provides a means to establish a correlation between the chemical nature, the surface morphology and the dimensions of drug-loaded microspheres on one hand and bioadhesive forces on the other, allowing the screening of the most promising materials from a relatively large group of natural and synthetic polymers which, from theoretical consideration, should be used for making bioadhesive microspheres. Solutions of medicament in buffered saline and similar vehicles are commonly employed to generate an aerosol in a nebulizer. Simple nebulizers operate on Bernoulli's principle and employ a stream of air or oxygen to generate the spray particles. More complex nebulizers employ ultrasound to create the spray particles. Both types are well known in the art and are described in standard textbooks of pharmacy such as Sprowls' American Pharmacy and Remington's The Science and Practice of Pharmacy. Other devices for generating aerosols employ compressed gases, usually hydrofluorocarbons and chlorofluorocarbons, which are mixed with the medicament and any necessary excipients in a pressurized container, these devices are likewise described in standard textbooks such as Sprowls and Remington.

[0288] The agents can be a free acid or base, or a pharmacologically acceptable salt thereof. Solids can be dissolved or dispersed immediately prior to administration or earlier. In some circumstances the preparations include a preservative to prevent the growth of microorganisms. The pharmaceutical forms suitable for injection can include sterile aqueous or organic solutions or dispersions which include, e.g., water, an alcohol, an organic solvent, an oil or other solvent or dispersant (e.g., glycerol, propylene glycol, polyethylene glycol, and vegetable oils). The formulations may contain antioxidants, buffers, bacteriostats, and solutes that render the formulation isotonic with the blood of the intended recipient, and aqueous and non-aqueous sterile suspensions that can include suspending agents, solubilizers, thickening agents, stabilizers, and preservatives. Pharmaceutical agents can be sterilized by filter sterilization or by other suitable means. The agent can be fused to immunoglobulins or albumin, albumin variants or fragments thereof, or incorporated into a liposome to improve half-life. Thus the peptides described herein may be fused directly or via a peptide linker, water soluble polymer, or prodrug linker to albumin or an analog, fragment, or derivative thereof. Generally, the albumin proteins that are part of the fusion proteins of the present invention may be derived from albumin cloned from any species, including human. Human serum albumin (HSA) consists of a single non-glycosylated polypeptide chain of 585 amino acids with a formula molecular weight of 66,500. The amino acid sequence of human HSA is known [See Meloun, et al. (1975) FEBS Letters 58:136; Behrens, et al. (1975) Fed. Proc. 34:591; Lawn, et al. (1981) Nucleic Acids Research 9:6102-6114; Minghetti, et al. (1986) J. Biol. Chem. 261:6747, each of which are incorporated by reference herein]. A variety of polymorphic variants as well as analogs and fragments of albumin have been described. [See Weitkamp, et al., (1973) Ann. Hum. Genet. 37:219]. For example, in EP 322,094, various shorter forms of HSA. Some of these fragments of HSA are disclosed, including HSA(1-373), HSA(1-388), HSA(1-389), HSA(1-369), and HSA(1-419) and fragments between 1-369 and 1-419. EP 399,666 discloses albumin fragments that include HSA(1-177) and HSA(1-200) and fragments between HSA(1-177) and HSA(1-200). Methods related to albumin fusion proteins can be found in U.S. Pat. No. 7,056,701. U.S. Pat. No. 6,994,857. U.S. Pat. No. 6,946,134, U.S. Pat. No. 6,926,898, and U.S. Pat. No. 6,905,688 and the related priority documents and references cited therein. The agent can also be conjugated to polyethylene glycol (PEG) chains. Methods for pegylation and additional formulations containing PEG-conjugates (i.e. PEG-based hydrogels, PEG modified liposomes) can be found in Harris and Chess, Nature Reviews Drug Discovery 2: 214-221 and the references therein. Peptides can also be modified with alkyl groups (e.g., C1-C20 straight or branched alkyl groups); fatty acid radicals; and combinations of PEG, alkyl groups and fatty acid radicals (see U.S. Pat. No. 6,309,633; Soltero et al., 2001 Innovations in Pharmaceutical Technology 106-110). The agent can be administered via a nanocochleate or cochleate delivery vehicle (BioDelivery Sciences International). The agents can be delivered transmucosally (i.e. across a mucosal surface such as the vagina, eye or nose) using formulations such as that described in U.S. Pat. No. 5,204,108. The agents can be formulated in microcapsules as described in WO 88/01165. The agent can be administered intra-orally using the formulations described in U.S. 20020055496, WO 00/47203, and U.S. Pat. No. 6,495,120. The agent can be delivered using nanoemulsion formulations described in WO 01/91728A2.

### Controlled Release Formulations

[0289] In general, one can provide for controlled release of the agents described herein through the use of a wide variety of polymeric carriers and controlled release systems including erodible and non-erodible matrices, osmotic control devices, various reservoir devices, enteric coatings and multiparticulate control devices.

[0290] Matrix devices are a common device for controlling the release of various agents. In such devices, the agents described herein are generally present as a dispersion within the polymer matrix, and are typically formed by the compression of a polymer/drug mixture or by dissolution or melting. The dosage release properties of these devices may be dependent upon the solubility of the agent in the polymer matrix or, in the case of porous matrices, the solubility in the sink solution within the pore network, and the tortuosity of the network. In one instance, when utilizing an erodible polymeric matrix, the matrix imbibes water and forms an aqueous-swollen gel that entraps the agent. The matrix then gradually erodes, swells, disintegrates or dissolves in the GI tract, thereby controlling release of one or more of the agents described herein. In non-erodible devices, the agent is released by diffusion through an inert matrix.

[0291] Agents described herein can be incorporated into an erodible or non-erodible polymeric matrix controlled release device. By an erodible matrix is meant aqueous-erodible or water-swellable or aqueous-soluble in the sense of being either erodible or swellable or dissolvable in pure water or requiring the presence of an acid or base to ionize the polymeric matrix sufficiently to cause erosion or dissolution. When contacted with the aqueous environment of use, the erodible polymeric matrix imbibes water and forms an aqueous-swollen gel or matrix that entraps the agent described herein. The aqueous-swollen matrix gradually erodes, swells, disintegrates or dissolves in the environment of use, thereby controlling the release of a compound described herein to the environment of use.

[0292] The erodible polymeric matrix into which an agent described herein can be incorporated may generally be described as a set of excipients that are mixed with the agent following its formation that, when contacted with the aqueous environment of use imbibes water and forms a water-swollen gel or matrix that entraps the drug form. Drug release may occur by a variety of mechanisms, for example, the matrix may disintegrate or dissolve from around particles or granules of the agent or the agent may dissolve in the imbibed aqueous solution and diffuse from the tablet, beads or granules of the device. One ingredient of this water-swollen matrix is the water-swellable, erodible, or soluble polymer, which may generally be described as an osmopolymer, hydrogel or water-swellable polymer. Such polymers may be linear, branched, or crosslinked. The polymers may be homopolymers or copolymers. In certain embodiments, they may be synthetic polymers derived from vinyl, acrylate, methacrylate, urethane, ester and oxide monomers. In other embodiments, they can be derivatives of naturally occurring polymers such as polysaccharides (e.g. chitin, chitosan, dextran and pullulan; gum agar, gum arabic, gum karaya, locust bean gum, gum tragacanth, carrageenans, gum ghatti, guar gum, xanthan gum and scleroglucan), starches (e.g. dextrin and maltodextrin), hydrophilic colloids (e.g. pectin), phosphatides (e.g. lecithin), alginates (e.g. ammonium alginate, sodium, potassium or calcium alginate, propylene glycol alginate), gelatin, collagen, and cellulosics. Cellulosics are cellulose polymer that has been modified by reaction of at least a portion of the hydroxyl groups on the saccharide repeat units with a compound to form an ester-linked or an ether-linked substituent. For example, the cellulosic ethyl cellulose has an ether linked ethyl substituent attached to the saccharide repeat unit, while the cellulosic cellulose acetate has an ester linked acetate substituent. In certain embodiments, the cellulosics for the erodible matrix comprises aqueous-soluble and aqueous-erodible cellulosics can include, for example, ethyl cellulose (EC), methylethyl cellulose (MEC), carboxymethyl cellulose (CMC), CMEC, hydroxyethyl cellulose (HEC), hydroxypropyl cellulose (HPC), cellulose acetate (CA), cellulose propionate (CP), cellulose butyrate (CB), cellulose acetate butyrate (CAB), CAP, CAT, hydroxypropyl methyl cellulose (HPMC), HPMCP, HPMCAS, hydroxypropyl methyl cellulose acetate trimellitate (HPMCAT), and ethylhydroxy ethylcellulose (EHEC). In certain embodiments, the cellulosics comprises various grades of low viscosity (MW less than or equal to 50,000 daltons, for example, the Dow Methocel™ series E5, E15LV, E50LV and K100LY) and high viscosity (MW greater than 50,000 daltons, for example, E4MCR, E10MCR, K4M, K15M and K100M and the Methocel™ K series) HPMC. Other commercially available types of HPMC include the Shin Etsu Metolose 90SH series. The choice of matrix material can have a large effect on the maximum drug concentration attained by the device as well as the maintenance of a high drug concentration. The matrix material can be a concentration-enhancing polymer, for example, as described in WO05/01 1634.

[0293] Other materials useful as the erodible matrix material include, but are not limited to, pullulan, polyvinyl pyrrolidone, polyvinyl alcohol, polyvinyl acetate, glycerol fatty acid esters, polyacrylamide, polyacrylic acid, copolymers of ethacrylic acid or methacrylic acid (EUDRAGITO, Rohm America, Inc., Piscataway, N.J.) and other acrylic acid derivatives such as homopolymers and copolymers of butylmethacrylate, methylmethacrylate, ethylmethacrylate, ethylacrylate, (2-dimethylaminoethyl) methacrylate, and (trimethylaminoethyl) methacrylate chloride.

[0294] The erodible matrix polymer may contain a wide variety of the same types of additives and excipients known in the pharmaceutical arts, including osmopolymers, osmagens, solubility-enhancing or -retarding agents and excipients that promote stability or processing of the device.

[0295] Alternatively, the agents of the present invention may be administered by or incorporated into a non-erodible matrix device. In such devices, an agent described herein is distributed in an inert matrix. The agent is released by diffusion through the inert matrix.

[0296] Examples of materials suitable for the inert matrix include insoluble plastics (e.g methyl acrylate-methyl methacrylate copolymers, polyvinyl chloride, polyethylene), hydrophilic polymers (e.g. ethyl cellulose, cellulose acetate, crosslinked polyvinylpyrrolidone (also known as crospovidone)), and fatty compounds (e.g. carnauba wax, microcrystalline wax, and triglycerides). Such devices are described further in Remington: The Science and Practice of Pharmacy, 20th edition (2000).

[0297] Matrix controlled release devices may be prepared by blending an agent described herein and other excipients together, and then forming the blend into a tablet, caplet, pill, or other device formed by compressive forces. Such compressed devices may be formed using any of a wide variety of presses used in the fabrication of pharmaceutical devices. Examples include single-punch presses, rotary tablet presses, and multilayer rotary tablet presses, all well known in the art. See for example, Remington: The Science and Practice of Pharmacy, 20th Edition, 2000. The compressed device may be of any shape, including round, oval, oblong, cylindrical, or triangular. The upper and lower surfaces of the compressed device may be flat, round, concave, or convex.

[0298] In certain embodiments, when formed by compression, the device has a strength of at least 5 Kiloponds (Kp)/cm² (for example, at least 7 Kp/cm²). Strength is the fracture force, also known as the tablet hardness required to fracture a tablet formed from the materials, divided by the maximum cross-sectional area of the tablet normal to that force. The fracture force may be measured using a Schleuniger Tablet Hardness Tester, Model 6D. The compression force required to achieve this strength will depend on the size of the tablet, but generally will be greater than about 5 kP/cm². Friability is a well-know measure of a device's resistance to surface abrasion that measures weight loss in percentage after subjecting the device to a standardized agitation procedure. Friability values of from 0.8 to 1.0% are regarded as constituting the upper limit of acceptability. Devices having a strength of greater than 5 kP/cm² generally are very robust, having a friability of less than 0.5%. Other methods for forming matrix controlled-release devices are well known in the pharmaceutical arts, See for example, Remington: The Science and Practice of Pharmnacy, 20th Edition, 2000.

[0299] As noted above, the agents described herein may also be incorporated into an osmotic control device. Such devices generally include a core containing one or more agents as described herein and a water permeable, non-dissolving and non-eroding coating surrounding the core which controls the influx of water into the core from an aqueous environment of use so as to cause drug release by extrusion of some or all of the core to the environment of use. In certain embodiments, the coating is polymeric, aqueous-permeable, and has at least one delivery port. The core of the osmotic device optionally includes an osmotic agent which acts to imbibe water from the surrounding environment via such a semi-permeable membrane. The osmotic agent contained in the core of this device may be an aqueous-swellable hydrophilic polymer or it may be an osmogen, also known as an osmagent. Pressure is generated within the device which forces the agent(s) out of the device via an orifice (of a size designed to minimize solute diffusion while preventing the build-up of a hydrostatic pressure head).

[0300] Osmotic agents create a driving force for transport of water from the environment of use into the core of the device. Osmotic agents include but are not limited to water-swellable hydrophilic polymers, and osmogens (or osmagens). Thus, the core may include water-swellable hydrophilic polymers, both ionic and nonionic, often referred to as osmopolymers and hydrogels. The amount of water-swellable hydrophilic polymers present in the core may range from about 5 to about 80 wt % (including for example, 10 to 50 wt %). Nonlimiting examples of core materials include hydrophilic vinyl and acrylic polymers, polysaccharides such as calcium alginate, polyethylene oxide (PEO), polyethylene glycol (PEG), polypropylene glycol (PPG), poly (2-hydroxyethyl methacrylate), poly (acrylic) acid, poly (methacrylic) acid, polyvinylpyrrolidone (PVP) and crosslinked PVP, polyvinyl alcohol (PVA), PVA/PVP copolymers and PVA/PVP copolymers with hydrophobic monomers such as methyl methacrylate, vinyl acetate, and the like, hydrophilic polyurethanes containing large PEO blocks, sodium croscarmellose, carrageenan, hydroxyethyl cellulose (HEC), hydroxypropyl cellulose (HPC), hydroxypropyl methyl cellulose (HPMC), carboxymethyl cellulose (CMC) and carboxyethyl cellulose (CEC), sodium alginate, polycarbophil, gelatin, xanthan gum, and sodium starch glycolat. Other materials include hydrogels comprising interpenetrating networks of polymers that may be formed by addition or by condensation polymerization, the components of which may comprise hydrophilic and hydrophobic monomers such as those just mentioned. Water-swellable hydrophilic polymers include but are not limited to PEO, PEG, PVP, sodium croscarmellose, HPMC, sodium starch glycolate, polyacrylic acid and crosslinked versions or mixtures thereof.

[0301] The core may also include an osmogen (or osmagent). The amount of osmogen present in the core may range from about 2 to about 70 wt % (including, for example, from 10 to 50 wt %). Typical classes of suitable osmogens are water-soluble organic acids, salts and sugars that are capable of imbibing water to thereby effect an osmotic pressure gradient across the barrier of the surrounding coating. Typical useful osmogens include but are not limited to magnesium sulfate, magnesium chloride, calcium chloride, sodium chloride, lithium chloride, potassium sulfate, sodium carbonate, sodium sulfite, lithium sulfate, potassium chloride, sodium sulfate, mannitol, xylitol, urea, sorbitol, inositol, raffinose, sucrose, glucose, fructose, lactose, citric acid, succinic acid, tartaric acid, and mixtures thereof. In certain embodiments, the osmogen is glucose, lactose, sucrose, mannitol, xylitol, sodium chloride, including combinations thereof.

[0302] The core may include a wide variety of additives and excipients that enhance the performance of the dosage form or that promote stability, tableting or processing. Such additives and excipients include tableting aids, surfactants, water- soluble polymers, pH modifiers, fillers, binders, pigments, disintegrants, antioxidants, lubricants and flavorants. Nonlimiting examples of additives and excipients include but are not limited to those described elsewhere herein as well as microcrystalline cellulose, metallic salts of acids (e.g. aluminum stearate, calcium stearate, magnesium stearate, sodium stearate, zinc stearate), pH control agents (e.g. buffers, organic acids, organic acid salts, organic and inorganic bases), fatty acids, hydrocarbons and fatty alcohols (e.g. stearic acid, palmitic acid, liquid paraffin, stearyl alcohol, and palmitol), fatty acid esters (e.g. glyceryl (mono- and di-) stearates, triglycerides, glyceryl (palmiticstearic) ester, sorbitan esters (e.g. sorbitan monostearate, saccharose monostearate, saccharose monopalmitate, sodium stearyl furmarate), polyoxyethylene sorbitan esters), surfactants (e.g. alkyl sulfates (e.g. sodium lauryl sulfate, magnesium lauryl sulfate), polymers (e.g. polyethylene glycols, polyoxyethylene glycols, polyoxyethylene, polyoxypropylene ethers, including copolymers thereof), polytetrafluoroethylene), and inorganic materials (e.g. talc, calcium phosphate), cyclodextrins, sugars (e.g. lactose, xylitol), sodium starch glycolate). Nonlimiting examples of disintegrants are sodium starch glycolate (e.g., Explotab™ CLV, (microcrystalline cellulose (e.g., Avicel™), inicrocrystalline silicified cellulose (e.g., ProSolv™), croscarmellose sodium (e.g., Ac-Di-Sol™). When the agent described herein is a solid amorphous dispersion formed by a solvent process, such additives may be added directly to the spray-drying solution when forming an agent described herein/concentration-enhancing polymer dispersion such that the additive is dissolved or suspended in the solution as a slurry, Alternatively, such additives may be added following the spray-drying process to aid in forming the final controlled release device.

[0303] A nonlimiting example of an osmotic device consists of one or more drug layers containing an agent described herein, such as a solid amorphous drug/polymer dispersion, and a sweller layer that comprises a water-swellable polymer, with a coating surrounding the drug layer and sweller layer. Each layer may contain other excipients such as tableting aids, osmagents, surfactants, water-soluble polymers and water-swellable polymers.

[0304] Such osmotic delivery devices may be fabricated in various geometries including bilayer (wherein the core comprises a drug layer and a sweller layer adjacent to each other), trilayer (wherein the core comprises a sweller layer sandwiched between two drug layers) and concentric (wherein the core comprises a central sweller agent surrounded by the drug layer). The coating of such a tablet comprises a membrane permeable to water but substantially impermeable to drug and excipients contained within. The coating contains one or more exit passageways or ports in communication with the drug-containing layer(s) for delivering the drug agent. The drug-containing layer(s) of the core contains the drug agent (including optional osmagents and hydrophilic water-soluble polymers), while the sweller layer consists of an expandable hydrogel, with or without additional osmotic agents.

[0305] When placed in an aqueous medium, the tablet imbibes water through the membrane, causing the agent to form a dispensable aqueous agent, and causing the hydrogel layer to expand and push against the drug-containing agent, forcing the agent out of the exit passageway. The agent can swell, aiding in forcing the drug out of the passageway. Drug can be delivered from this type of delivery system either dissolved or dispersed in the agent that is expelled from the exit passageway.

[0306] The rate of drug delivery is controlled by such factors as the permeability and thickness of the coating, the osmotic pressure of the drug-containing layer, the degree of hydrophilicity of the hydrogel layer, and the surface area of the device. Those skilled in the art will appreciate that increasing the thickness of the coating will reduce the release rate, while any of the following will increase the release rate: increasing the permeability of the coating; increasing the hydrophilicity of the hydrogel layer; increasing the osmotic pressure of the drug-containing layer; or increasing the device's surface area.

[0307] Other materials useful in forming the drug-containing agent, in addition to the agent described herein itself, include HPMC, PEO and PVP and other pharmaceutically acceptable carriers. In addition, osmagents such as sugars or salts, including but not limited to sucrose, lactose, xylitol, mannitol, or sodium chloride, may be added. Materials which are useful for forming the hydrogel layer include sodium CMC, PEO (e.g. polymers having an average molecular weight from about 5,000,000 to about 7,500,000 daltons), poly (acrylic acid), sodium (polyacrylate), sodium croscarmellose, sodium starch glycolat, PVP, crosslinked PVP, and other high molecular weight hydrophilic materials.

[0308] In the case of a bilayer geometry, the delivery port(s) or exit passageway(s) may be located on the side of the tablet containing the drug agent or may be on both sides of the tablet or even on the edge of the tablet so as to connect both the drug layer and the sweller layer with the exterior of the device. The exit passageway(s) may be produced by mechanical means or by laser drilling, or by creating a difficult-to-coat region on the tablet by use of special tooling during tablet compression or by other means.

[0309] The osmotic device can also be made with a homogeneous core surrounded by a semipermeable membrane coating, as in U.S. Pat. No. 3,845,770. The agent described herein can be incorporated into a tablet core and a semipermeable membrane coating can be applied via conventional tablet-coating techniques such as using a pan coater. A drug delivery passageway can then be formed in this coating by drilling a hole in the coating, either by use of a laser or mechanical means. Alternatively, the passageway may be formed by rupturing a portion of the coating or by creating a region on the tablet that is difficult to coat, as described above. In one embodiment, an osmotic device comprises: (a) a single-layer compressed core comprising: (i) an agent described herein, (ii) a hydroxyethylcellulose, and (iii) an osmagent, wherein the hydroxyethylcellulose is present in the core from about 2.0% to about 35% by weight and the osmagent is present from about 15% to about 70% by weight; (b) a water-permeable layer surrounding the core; and (c) at least one passageway within the water-permeable layer (b) for delivering the drug to a fluid environment surrounding the tablet. In certain embodiments, the device is shaped such that the surface area to volume ratio (of a water-swollen tablet) is greater than 0.6 mm⁻¹ (including, for example, greater than 1.0 mm⁻¹). The passageway connecting the core with the fluid environment can be situated along the tablet band area. In certain embodiments, the shape is an oblong shape where the ratio of the tablet tooling axes, i.e., the major and minor axes which define the shape of the tablet, are between 1.3 and 3 (including, for example, between 1.5 and 2.5). In one embodiment, the combination of the agent described herein and the osmagent have an average ductility from about 100 to about 200 Mpa, an average tensile strength from about 0.8 to about 2.0 Mpa, and an average brittle fracture index less than about 0.2. The single-layer core may optionally include a disintegrant, a bioavailability enhancing additive, and/or a pharmaceutically acceptable excipient, carrier or diluent.

[0310] In certain embodiments, entrainment of particles of agents described herein in the extruding fluid during operation of such osmotic device is desirable. For the particles to be well entrained, the agent drug form is dispersed in the fluid before the particles have an opportunity to settle in the tablet core. One means of accomplishing this is by adding a disintegrant that serves to break up the compressed core into its particulate components. Nonlimiting examples of standard disintegrants include materials such as sodium starch glycolate (e.g., Explotab™ CLV), microcrystalline cellulose (e.g., Avicel™), microcrystalline silicified cellulose (e.g., ProSolv™) and croscarmellose sodium (e.g., Ac-Di-Sol™), and other disintegrants known to those skilled in the art. Depending upon the particular formulation, some disintegrants work better than others. Several disintegrants tend to form gels as they swell with water, thus hindering drug delivery from the device. Non-gelling, non-swelling disintegrants provide a more rapid dispersion of the drug particles within the core as water enters the core. In certain embodiments, non-gelling, non-swelling disintegrants are resins, for example, ion-exchange resins. In one embodiment, the resin is Aminberlite™ IRP 88 (available from Rohm and Haas, Philadelphia, Pa.). When used, the disintegtant is present in amounts ranging from about 50-74% of the core agent.

[0311] Water-soluble polymers are added to keep particles of the agent suspended inside the device before they can be delivered through the passageway(s) (e.g., an orifice). High viscosity polymers are useful in preventing settling. However, the polymer in combination with the agent is extruded through the passageway(s) under relatively low pressures. At a given extrusion pressure, the extrusion rate typically slows with increased viscosity. Certain polymers in combination with particles of the agent described herein form high viscosity solutions with water but are still capable of being extruded from the tablets with a relatively low force. In contrast, polymers having a low weight-average, molecular weight (<about 300,000) do not form sufficiently viscous solutions inside the tablet core to allow complete delivery due to particle settling. Settling of the particles is a problem when such devices are prepared with no polymer added, which leads to poor drug delivery unless the tablet is constantly agitated to keep the particles from settling inside the core. Settling is also problematic when the particles are large and/or of high density such that the rate of settling increases.

[0312] In certain embodiments, the water-soluble polymers for such osmotic devices do not interact with the drug. In certain embodiments the water-soluble polymer is a non-ionic polymer. A nonlimiting example of a non-ionic polymer forming solutions having a high viscosity yet still extrudable at low pressures is Natrosol™ 250H (high molecular weight hydroxyethylcellulose, available from Hercules. Incorporated, Aqualon Division, Wilmington, Del.; MW equal to about 1 million daltons and a degree of polymerization equal to about 3,700). Natrosol 250H™ provides effective drug delivery at concentrations as low as about 3% by weight of the core when combined with an osmagent. Natrosol 250H™ NF is a high-viscosity grade nonionic cellulose ether that is soluble in hot or cold water. The viscosity of a 1% solution of Natrosol 250H using a Brookfield LVT (30 rpm) at 25° C. is between about 1,500 and about 2,500 cps.

[0313] In certain embodiments, hydroxyethylcellulose polymers for use in these monolayer osmotic tablets have a weight-average, molecular weight from about 300,000 to about 1.5 million. The hydroxyethylcellulose polymer is typically present in the core in an amount from about 2.0% to about 35% by weight.

[0314] Another example of an osmotic device is an osmotic capsule. The capsule shell or portion of the capsule shell can be semipermeable. The capsule can be filled either by a powder or liquid consisting of an agent described herein, excipients that imbibe water to provide osmotic potential, and/or a water-swellable polymer, or optionally solubilizing excipients. The capsule core can also be made such that it has a bilayer or multilayer agent analogous to the bilayer, trilayer or concentric geometries described above.

[0315] Another class of osmotic device useful in this invention comprises coated swellable tablets, for example, as described in EP378404. Coated swellable tablets comprise a tablet core comprising an agent described herein and a swelling material, preferably a hydrophilic polymer, coated with a membrane, which contains holes, or pores through which, in the aqueous use environment, the hydrophilic polymer can extrude and carry out the agent. Alternatively, the membrane may contain polymeric or low molecular weight water-soluble porosigens. Porosigens dissolve in the aqueous use environment, is providing pores through which the hydrophilic polymer and agent may extrude. Examples of porosigens are water-soluble polymers such as HPMC, PEG, and low molecular weight compounds such as glycerol, sucrose, glucose, and sodium chloride. In addition, pores may be formed in the coating by drilling holes in the coating using a laser or other mechanical means. In this class of osmotic devices, the membrane material may comprise any film-forming polymer, including polymers which are water permeable or impermeable, providing that the membrane deposited on the tablet core is porous or contains water-soluble porosigens or possesses a macroscopic hole for water ingress and drug release. Embodiments of this class of sustained release devices may also be multilayered, as described, for example, in EP378404.

[0316] When an agent described herein is a liquid or oil, such as a lipid vehicle formulation, for example as described in WO05/011634, the osmotic controlled-release device may comprise a soft-gel or gelatin capsule formed with a composite wall and comprising the liquid formulation where the wall comprises a barrier layer formed over the external surface of the capsule, an expandable layer formed over the barrier layer, and a semipermeable layer formed over the expandable layer. A delivery port connects the liquid formulation with the aqueous use environment. Such devices are described, for example, in U.S. Pat. No. 6,419,952, U.S. Pat. No. 6,342,249, U.S. Pat. No. 5,324,280, U.S. Pat. No. 4,672,850, U.S. Pat. No. 4,627,850, U.S. Pat. No. 4,203,440, and U.S. Pat. No. 3,995,631.

[0317] The osmotic controlled release devices of the present invention can also comprise a coating. In certain embodiments, the osmotic controlled release device coating exhibits one or more of the following features: is water-permeable, has at least one port for the delivery of drug, and is non-dissolving and non-eroding during release of the drug formulation, such that drug is substantially entirely delivered through the delivery port(s) or pores as opposed to delivery primarily via permeation through the coating material itself. Delivery ports include any passageway, opening or pore whether made mechanically, by laser drilling, by pore formation either during the coating process or in situ during use or by rupture during use. In certain embodiments, the coating is present in an amount ranging from about 5 to 30 wt % (including, for example, 10 to 20 wt %) relative to the core weight.

[0318] One form of coating is a semipermeable polymeric membrane that has the port(s) formed therein either prior to or during use. Thickness of such a polymeric membrane may vary between about 20 and 800 μm (including, for example, between about 100 to 500 μm). The diameter of the delivery port (s) may generally range in size from 0.1 to 3000 μm or greater (including, for example, from about 50 to 3000 μm in diameter). Such port(s) may be formed post-coating by mechanical or laser drilling or may be formed in situ by rupture of the coatings; such rupture may be controlled by intentionally incorporating a relatively small weak portion into the coating. Delivery ports may also be formed in situ by erosion of a plug of water-soluble material or by rupture of a thinner portion of the coating over an indentation in the core. In addition, delivery ports may be formed during coating, as in the case of asymmetric membrane coatings of the type disclosed in U.S. Pat. No. 5,612,059 and U.S. Pat. No. 5,698,220. The delivery port may be formed in situ by rupture of the coating, for example, when a collection of beads that may be of essentially identical or of a variable agent are used. Drug is primarily released from such beads following rupture of the coating and, following rupture, such release may be gradual or relatively sudden. When the collection of beads has a variable agent, the agent may be chosen such that the beads rupture at various times following administration, resulting in the overall release of drug being sustained for a desired duration.

[0319] Coatings may be dense, microporous or asymmetric, having a denser region supported by a thick porous region such as those disclosed in U.S. Pat. No. 5,612,059 and U.S. Pat. No. 5,698,220. When the coating is dense the coating can be composed of a water-permeable material. When the coating is porous, it may be composed of either a water-permeable or a water-impermeable material. When the coating is composed of a porous water-impermeable material, water permeates through the pores of the coating as either a liquid or a vapor. Nonlimiting examples of osmotic devices that utilize dense coatings include U.S. Pat. No. 3,995,631 and U.S. Pat. No. 3,845,770. Such dense coatings are permeable to the external fluid such as water and may be composed of any of the materials mentioned in these patents as well as other water-permeable polymers known in the art.

[0320] The membranes may also be porous as disclosed, for example, in U.S. Pat. No. 5,654,005 and U.S. Pat. No. 5,458,887 or even be formed from water-resistant polymers. U.S. Pat. No. 5,120,548 describes another suitable process for forming coatings from a mixture of a water-insoluble polymer and a leachable water-soluble additive. The porous membranes may also be formed by the addition of pore-formers as disclosed in U.S. Pat. No. 4,612,008. In addition, vapor-permeable coatings may even be formed from extremely hydrophobic materials such as polyethylene or polyvinylidene difluorid that, when dense, are essentially water-impermeable, as long as such coatings are porous. Materials useful in forming the coating include but are not limited to various grades of acrylic, vinyls, ethers, polyamides, polyesters and cellulosic derivatives that are water-permeable and water-insoluble at physiologically relevant pHs, or are susceptible to being rendered water-insoluble by chemical alteration such as by crosslinking. Nonlimiting examples of suitable polymers (or crosslinked versions) useful in forming the coating include plasticized, unplasticized and reinforced cellulose acetate (CA), cellulose diacetate, cellulose triacetate, CA propionate, cellulose nitrate, cellulose acetate butyrate (CAB), CA ethyl carbamate, CAP, CA methyl carbamate, CA succinate, cellulose acetate trimellitate (CAT), CA dimethylaminoacetate, CA ethyl carbonate, CA chloroacetate, CA ethyl oxalate, CA methyl sulfonate, CA butyl sulfonate, CA p-toluene sulfonate, agar acetate, amylose triacetate, beta glucan acetate, beta glucan triacetate, acetaldehyde dimethyl acetate, triacetate of locust bean gum, hydroxiated ethylene-vinylacetate, EC, PEG, PPG, PEG/PPG copolymers, PVP, HEC, HPC, CMC, CMEC, HPMC, HPMCP, HPMCAS, HPMCAT, poly (acrylic) acids and esters and poly- (methacrylic) acids and esters and copolymers thereof, starch, dextran, dextrin, chitosan, collagen, gelatin, polyalkenes, polyethers, polysulfones, polyethersulfones, polystyrenes, polyvinyl halides, polyvinyl esters and ethers, natural waxes and synthetic waxes. In various embodiments, the coating agent comprises a cellulosic polymer, in particular cellulose ethers, cellulose esters and cellulose ester-ethers, i.e., cellulosic derivatives having a mixture of ester and ether substituents, the coating materials are made or derived from poly (acrylic) acids and esters, poly (methacrylic) acids and esters, and copolymers thereof, the coating agent comprises cellulose acetate, the coating comprises a cellulosic polymer and PEG, the coating comprises cellulose acetate and PEG.

[0321] Coating is conducted in conventional fashion, typically by dissolving or suspending the coating material in a solvent and then coating by dipping, spray coating or by pan-coating. In certain embodiments, the coating solution contains 5 to 15 wt % polymer. Typical solvents useful with the cellulosic polymers mentioned above include but are not limited to acetone, methyl acetate, ethyl acetate, isopropyl acetate, n-butyl acetate, methyl isobutyl ketone, methyl propyl ketone, ethylene glycol monoethyl ether, ethylene glycol monoethyl acetate, methylene dichloride, ethylene dichloride, propylene dichloride, nitroethane, nitropropane, tetrachloroethane, 1,4dioxane, tetrahydrofuran, diglyme, water, and mixtures thereof. Pore-formers and non-solvents (such as water, glycerol and ethanol) or plasticizers (such as diethyl phthalate) may also be added in any amount as long as the polymer remains soluble at the spray temperature. Pore-formers and their use in fabricating coatings are described, for example, in U.S. Pat. No. 5,612,059. Coatings may also be hydrophobic microporous layers wherein the pores are substantially filled with a gas and are not wetted by the aqueous medium but are permeable to water vapor, as disclosed, for example, in U.S. Pat. No. 5,798,119. Such hydrophobic but water-vapor permeable coatings are typically composed of hydrophobic polymers such as polyalkenes, polyacrylic acid derivatives, polyethers, polysulfones, polyethersulfones, polystyrenes, polyvinyl halides, polyvinyl esters and ethers, natural waxes and synthetic waxes. Hydrophobic microporous coating materials include but are not limited to polystyrene, polysulfones, polyethersulfones, polyethylene, polypropylene, polyvinyl chloride, polyvinylidene fluoride and polytetrafluoroethylene. Such hydrophobic coatings can be made by known phase inversion methods using any of vapor-quench, liquid quench, thermal processes, leaching soluble material from the coating or by sintering coating particles. In thermal processes, a solution of polymer in a latent solvent is brought to liquid-liquid phase separation in a cooling step. When evaporation of the solvent is not prevented, the resulting membrane will typically be porous. Such coating processes may be conducted by the processes disclosed, for example, in U.S. Pat. No. 4,247,498, U.S. Pat. No. 4,490,431 and U.S. Pat. No. 4,744,906. Osmotic controlled-release devices may be prepared using procedures known in the pharmaceutical arts. See for example, Remington: The Science and Practice of Pharmacy, 20th Edition, 2000.

[0322] As further noted above, the agents described herein may be provided in the form of microparticulates, generally ranging in size from about 10 μm to about 2 mm (including, for example, from about 100 μm to 1 mm in diameter). Such multiparticulates may be packaged, for example, in a capsule such as a gelatin capsule or a capsule formed from an aqueous-soluble polymer such as HPMCAS, HPMC or starch; dosed as a suspension or slurry in a liquid; or they may be formed into a tablet, caplet, or pill by compression or other processes known in the art. Such multiparticulates may be made by any known process, such as wet- and dry-granulation processes, extrusion/spheronization, roller-compaction, melt-congealing, or by spray-coating seed cores. For example, in wet- and dry-granulation processes, the agent described herein and optional excipients may be granulated to form multiparticulates of the desired size. Other excipients, such as a binder (e.g., microcrystalline cellulose), may be blended with the agent to aid in processing and forming the multiparticulates. In the case of wet granulation, a binder such as microcrystalline cellulose may be included in the granulation fluid to aid in forming a suitable multip articulate. See, for example, Remington: The Science and Practice of Pharmacy, 20″ Edition, 2000. In any case, the resulting particles may themselves constitute the therapeutic composition or they may be coated by various film-forming materials such as enteric polymers or water-swellable or water-soluble polymers, or they may be combined with other excipients or vehicles to aid in dosing to patients. Suitable pharmaceutical compositions in accordance with the invention will generally include an amount of the active compound(s) with an acceptable pharmaceutical diluent or excipient, such as a sterile aqueous solution, to give a range of final concentrations, depending on the intended use. The techniques of preparation are generally well known in the art, as exemplified by Remington's Pharmaceutical Sciences (18th Edition, Mack Publishing Company, 1995).

### Kits

[0323] The agents described herein and combination therapy agents can be packaged as a kit that includes single or multiple doses of two or more agents, each packaged or formulated individually, or single or multiple doses of two or more agents packaged or formulated in combination. Thus, one or more agents can be present in first container, and the kit can optionally include one or more agents in a second container. The container or containers are placed within a package, and the package can optionally include administration or dosage instructions. A kit can include additional components such as syringes or other means for administering the agents as well as diluents or other means for formulation.

[0324] Thus, the kits can comprise: a) a pharmaceutical composition comprising a compound described herein and a pharmaceutically acceptable carrier, vehicle or diluent; and b) a container or packaging. The kits may optionally comprise instructions describing a method of using the pharmaceutical compositions in one or more of the methods described herein (e.g. gastrointestinal motility disorders, chronic intestinal pseudo-obstruction, colonic pseudo-obstruction, Crohn's disease, duodenogastric reflux, dyspepsia, functional dyspepsia, nonulcer dyspepsia, a functional gastrointestinal disorder, functional heartburn, gastroesophageal reflux disease (GERD), gastroparesis, irritable bowel syndrome, post-operative ileus, ulcerative colitis, chronic constipation, and disorders and conditions associated with constipation (e.g. constipation associated with use of opiate painkillers, post-surgical constipation, and constipation associated with neuropathic disorders as well as other conditions and disorders described herein). The kit may optionally comprise a second pharmaceutical composition comprising one or more additional agents including but not limited to those including analgesic peptides and compounds, a phosphodiesterase inhibitor, an agent used to treat gastrointestinal and other disorders (including those described herein), an agent used to treat constipation, an antidiarrheal agent, an insulin or related compound (including those described herein), an anti-hypertensive agent, an agent useful in the treatment of respiratory and other disorders, an anti-obesity agent, an anti-diabetic agents, an agent that activates soluble guanylate cyclase and a pharmaceutically acceptable carrier, vehicle or diluent. The pharmaceutical composition comprising the compound described herein and the second pharmaceutical composition contained in the kit may be optionally combined in the same pharmaceutical composition.

[0325] A kit includes a container or packaging for containing the pharmaceutical compositions and may also include divided containers such as a divided bottle or a divided foil packet. The container can be, for example a paper or cardboard box, a glass or plastic bottle or jar, a re-sealable bag (for example, to hold a “refill” of tablets for placement into a different container), or a blister pack with individual doses for pressing out of the pack according to a therapeutic schedule. It is feasible that more than one container can be used together in a single package to market a single dosage form. For example, tablets may be contained in a bottle which is in turn contained within a box.

[0326] An example of a kit is a so-called blister pack. Blister packs are well known in the packaging industry and are being widely used for the packaging of pharmaceutical unit dosage forms (tablets, capsules, and the like). Blister packs generally consist of a sheet of relatively stiff material covered with a foil of a preferably transparent plastic material. During the packaging process, recesses are formed in the plastic foil. The recesses have the size and shape of individual tablets or capsules to be packed or may have the size and shape to accommodate multiple tablets and/or capsules to be packed. Next, the tablets or capsules are placed in the recesses accordingly and the sheet of relatively stiff material is sealed against the plastic foil at the face of the foil which is opposite from the direction in which the recesses were formed. As a result, the tablets or capsules are individually sealed or collectively sealed, as desired, in the recesses between the plastic foil and the sheet. Preferably the strength of the sheet is such that the tablets or capsules can be removed from the blister pack by manually applying pressure on the recesses whereby an opening is formed in the sheet at the place of the recess. The tablet or capsule can then be removed via said opening.

[0327] It maybe desirable to provide a written memory aid containing information and/or instructions for the physician, pharmacist or subject regarding when the medication is to be taken. A “daily dose” can be a single tablet or capsule or several tablets or capsules to be taken on a given day. When the kit contains separate compositions, a daily dose of one or more compositions of the kit can consist of one tablet or capsule while a daily dose of another one or more compositions of the kit can consist of several tablets or capsules. A kit can take the form of a dispenser designed to dispense the daily doses one at a time in the order of their intended use. The dispenser can be equipped with a memory-aid, so as to further facilitate compliance with the regimen. An example of such a memory-aid is a mechanical counter which indicates the number of daily doses that have been dispensed. Another example of such a memory-aid is a battery-powered micro-chip memory coupled with a liquid crystal readout, or audible reminder signal which, for example, reads out the date that the last daily dose has been taken and/or reminds one when the next dose is to be taken.

[0328] Methods to increase chemical and/or physical stability of the agents the described herein are found in U.S. Pat. No. 6,541,606, U.S. Pat. No. 6,068,850, U.S. Pat. No. 6,124,261, U.S. Pat. No. 5,904,935, and WO 00/15224, U.S. 20030069182 (via the additon of nicotinamide), U.S. 20030175230A1, U.S. 20030175230A1, U.S. 20030175239A1, U.S. 20020045582, U.S. 20010031726, WO 02/26248, WO 03/014304, WO 98/00152A1, WO 98/00157A1, WO 90/12029, WO 00/04880, and WO 91/04743, WO 97/04796 and the references cited therein.

[0329] Methods to increase bioavailability of the agents described herein are found in U.S. Pat. No. 6,008,187, U.S. Pat. No. 5,424,289, U.S. 20030198619, WO 90/01329, WO 01/49268, WO 00/32172, and WO 02/064166. Glycyrrhizinate can also be used as an absorption enhancer (see, e.g., EP397447). WO 03/004062 discusses Ulex europaeus I (UEAM) and UEAI mimetics which may be used to target the agents described herein to the GI tract. The bioavailability of the agents described herein can also be incrased by addition of oral bioavailability-enhancing agents such as those described in U.S. Pat. No. 6,818,615 including but not limited to: cyclosporins (including cyclosporins A through Z as defined in Table 1 of U.S. Pat. No. 6,818,615), for example, cyclosporin A (cyclosporin), cyclosporin F, cyclosporin D, dihydro cyclosporin A, dihydro cyclosporin C, acetyl cyclosporin A, PSC-833, (Me-Ile-4)-cyclosporin (SDZ-NIM 811) (both from Sandoz Pharmaceutical Corp.), and related oligopeptides produced by species in the genus Topycladium); antifungals including but not limited to ketoconazole; cardiovascular drug including but not limited to MS-209 (BASF), amiodarone, nifedipine, reserpine, quinidine, nicardipine, ethacrynic acid, propafenone, reserpine, amiloride; anti-migraine natural products including but not limited to ergot alkaloids; antibiotics including but not limited to cefoperazone, tetracycline, chloroquine, fosfomycin; antiparasitics including but not limited to ivermectin; multi-drug resistance reversers including but not limited to VX-7 10 and VX-853 (Vertex Pharmaceutical Incorporated); tyrosine kinase inhibitors including but not limited to genistein and related isoflavonoids, quercetin; protein kinase C inhibitors including but not limited to calphostin; apoptosis inducers including but not limited to ceramides; and agents active against endorphin receptors including but not limited to morphine, morphine congeners, other opioids and opioid antagonists including (but not limited to) naloxone, naltrexone and nalmefene).

[0330] The agents described herein can be fused to a modified version of the blood serum protein transferrin. U.S. 20030221201, U.S. 20040023334, U.S. 20030226155, WO 04/020454, and WO 04/019872 discuss the manufacture and use of transfernin fusion proteins. Transferrin fusion proteins may improve circulatory half life and efficacy, decrease undesirable side effects and allow reduced dosage.

[0331] The peptides and agonists described herein can be recombinantly expressed in bacteria. Bacteria expressing the peptide or agonists can be administered orally, rectally, mucosally or in via some other mode of administration including but not limited to those described herein. Bacterial hosts suitable for such administration include but are not limited to certain Lactobacteria (e.g. Lactococcus lactis, Lactobacillus plantarum, Lact. rhamnosus and Lact. paracasei ssp. Paracasie and other species found in normal human flora (Ahmne et al. Journal of Applied Microbiology 1998 85:88)), certain Streptococcus sp. (e.g. S. gordonii), and certain B. subtilis strains (including pSM539 described in Porzio et al. BMC Biotechnology 2004 4:27). The polypeptides and agonists described herein can be administered using the Heliobacter based preparation methods described in WO06/015445.

### Dosage

[0332] The dose range for adult humans is generally from 0.005 mg to 10g/day orally.

[0333] Tablets or other forms of presentation provided in discrete units may conveniently contain an amount of compound described herein which is effective at such dosage or as a multiple of the same, for instance, units containing 5 mg to 500 mg, usually around 10 mg to 200 mg. The precise amount of compound administered to a patient will be the responsibility of the attendant physician. However, the dose employed will depend on a number of factors, including the age and sex of the patient, the precise disorder being treated, and its severity.

[0334] A dosage unit (e.g. an oral dosage unit) can include from, for example, 1 to 30 μg, 1 to 40 μg, 1 to 50 μg, 1 to 100 μg, 1 to 200 μg, 1 to 300 μg, 1 to 400 μg, 1 to 500 μg, 1 to 600 μg, 1 to 700 μg, 1 to 800 μg, 1 to 900 μg, 1 to 1000 μg, 10 to 30 μg, 10 to 40 μg, 10 to 50 μg, 10 to 100 μg, 10 to 200 μg, 10 to 300 μg, 10 to 400 μg, 10 to 500 μg, 10 to 600 μg, 10 to 700 μg, 10 to 800 μg, 10 to 900 μg, 10 to 1000 μg, 100 to 200 μg, 100 to 300 μg, 100 to 400 μg, 100 to 500 μg; 100 to 600 μg, 100 to 700 μg, 100 to 800 μg, 100 to 900 μg, 100 to 1000 μg, 100 to 1250 μg, 100 to 1500 μg, 100 to 1750 μg, 100 to 2000 μg, 100 to 2250 μg, 100 to 2500 μg, 100 to 2750 μg, 100 to 3000 μg, 200 to 300 μg, 200 to 400 μg, 200 to 500 μg, 200 to 600 μg, 200 to 700 μg, 200 to 800 μg, 200 to 900 μg, 200 to 1000 μg, 200 to 1250 μg, 200 to 1500 μg, 200 to 1750 μg, 200 to 2000 μg, 200 to 2250 μg, 200 to 2500 μg, 200 to 2750 μg, 200 to 3000 μg, 300 to 400 μg, 300 to 500 μg, 300 to 600 μg, 300 to 700 μg, 300 to 800 μg, 300 to 900 μg, 300 to 1000 μg, 300 to 1250 μg, 300 to 1500 μg, 300 to 1750 μg, 300 to 2000 μg, 300 to 2250 μg, 300 to 2500 μg, 300 to 2750 μg, 300 to 3000 μg, 400 to 500 μg, 400 to 600 μg, 400 to 700 μg, 400 to 800 μg, 400 to 900 μg, 400 to 1000 μg, 400 to 1250 μg, 400 to 1500 μg, 400 to 1750 μg, 400 to 2000 μg, 400 to 2250 μg, 400 to 2500 μg, 400 to 2750 μg, 400 to 3000 μg, 500 to 600 μg, 500 to 700 μg, 500 to 800 μg, 500 to 900 μg, 500 to 1000 μg, 500 to 1250 μg, 500 to 1500 μg, 500 to 1750 μg, 500 to 2000 μg, 500 to 2250 μg, 500 to 2500 μg, 500 to 2750 μg, 500 to 3000 μg, 600 to 700 μg, 600 to 800 μg, 600 to 900 μg, 600 to 1000 μg, 600 to 1250 μg, 600 to 1500 μg, 600 to 1750 μg, 600 to 2000 μg, 600 to 2250 μg, 600 to 2500 μg, 600 to 2750 μg, 600 to 3000 μg, 700 to 800 μg, 700 to 900 μg, 700 to 1000 μg, 700 to 1250 μg, 700 to 1500 μg, 700 to 1750 μg, 700 to 2000 μg, 700 to 2250 μg, 700 to 2500 μg, 700 to 2750 μg, 700 to 3000 μg, 800 to 900 μg, 800 to 1000 μg, 800 to 1250 μg, 800 to 1500 μg, 800 to 1750 μg, 800 to 2000 μg, 800 to 2250 μg, 800 to 2500 μg, 800 to 2750 μg, 800 to 3000 μg, 900 to 1000 μg, 900 to 1250 μg, 900 to 1500 μg, 900 to 1750 μg, 900 to 2000 μg, 900 to 2250 μg, 900 to 2500 μg, 900 to 2750 μg, 900 to 3000 μg, 1000 to 1250 μg, 1000 to 1500 μg, 1000 to 1750 μg, 1000 to 2000 μg, 1000 to 2250 μg, 1000 to 2500 μg, 1000 to 2750 μg, 1000 to 3000 μg, 2 to 500 μg, 50 to 500 μg, 3 to 100 μg, 5 to 20 μg, 5 to 1100 μg, 10 μg, 20 μg, 30 μg, 40 μg, 50 μg, 60 μg, 70 μg, 75 μg, 80 μg, 90 μg, 100 μg, 150 μg, 200 μg, 250 μg, 300 μg, 350 μg, 400 μg, 450 μg, 500 μg, 550 μg, 600 μg, 650 μg, 700 μg, 750 μg, 800 μg, 850 μg, 900 μg, 950 μg, 1000 μg, 1050 μg, 1100 μg, 1150 μg, 1200 μg, 1250 μg, 1300 μg, 1350 μg, 1400 μg, 1450 μg, 1500 μg, 1550 μg, 1600 μg, 1650 μg, 1700 μg, 1750 μg, 1800 μg, 1850 μg, 1900 μg, 1950 μg, 2000 μg, 2050 μg, 2100 μg, 2150 μg, 2200 μg, 2250 μg, 2300 μg, 2350 μg, 2400 μg, 2450 μg, 2500 μg, 2550 μg, 2600 μg, 2650 μg, 2700 μg, 2750 μg, 2800 μg, 2850 μg, 2900 μg, 2950 μg, 3000 μg, 3250 μg, 3500 μg, 3750 μg, 4000 μg, 4250 μg, 4500 μg, 4750 μg, 5000 μg of a peptide or agonist described herein. Thus it may be desirable to administer 30, 75, 100, 150, 300, 600, 1000, or 3000 μg of a peptide or agonist described herein (e.g. SEQ ID NO:3, SEQ ID NO:6) to prevent and/or treat constipation (e.g. opioid induced constipation, idiopathic constipation). Thus it may be desirable to administer 30, 75, 100, 150, 300, 600, 1000, or 3000 μg of a peptide or agonist described herein (e.g. SEQ ID NO:3, SEQ ID NO:6) to prevent and/or treat irritable bowel syndrome (e.g. c-IBS, d-IBS, and/or a-IBS) and it may be desirable to administer these dosages as the total daily doseIn certain embodiments the dosage unit and daily dose are equivalent. In various embodiments, the dosage unit is administered with food at anytime of the day, without food at anytime of the day, with food after an overnight fast (e.g. with breakfast), at bedtime after a low fat snack. In various embodiments, the dosage unit is administered once a day, twice a day, three times a day, four times a day, five times a day, six times a day. The dosage unit can optionally comprise other agents.

[0335] A dosage unit (e.g. an oral dosage unit) can include, for example, from 1 to 30 μg, 1 to 40 μg, 1 to 50 μg, 1 to 100 μg, 1 to 200 μg, 1 to 300 μg, 1 to 400 μg, 1 to 500 μg, 1 to 600 μg, 1 to 700 μg, 1 to 800 μg, 1 to 900 μg, 1 to 1000 μg, 10 to 30 μg, 10 to 40 μg, 10 to 50 μg, 10 to 100 μg, 10 to 200 μg, 10 to 300 μg, 10 to 400 μg, 10 to 500 μg, 10 to 600 μg, 10 to 700 μg, 10 to 800 μg, 10 to 900 μg, 10 to 1000 μg, 100 to 200 μg, 100 to 300 μg, 100 to 400 μg, 100 to 500 μg, 100 to 600 μg, 100 to 700 μg, 100 to 800 μg, 100 to 900 μg, 100 to 1000 μg, 100 to 1250 μg, 100 to 1500 μg, 100 to 1750 μg, 100 to 2000 μg, 100 to 2250 μg, 100 to 2500 μg, 100 to 2750 μg, 100 to 3000 μg, 200 to 300 μg, 200 to 400 μg, 200 to 500 μg, 200 to 600 μg, 200 to 700 μg, 200 to 800 μg, 200 to 900 μg, 200 to 1000 μg, 200 to 1250 μg, 200 to 1500 μg, 200 to 1750 μg, 200 to 2000 μg, 200 to 2250 μg, 200 to 2500 μg, 200 to 2750 μg, 200 to 3000 μg, 300 to 400 μg, 300 to 500 μg, 300 to 600 μg, 300 to 700 μg, 300 to 800 μg, 300 to 900 μg, 300 to 1000 μg, 300 to 1250 μg, 300 to 1500 μg, 300 to 1750 μg, 300 to 2000 μg, 300 to 2250 μg, 300 to 2500 μg, 300 to 2750 μg, 300 to 3000 μg, 400 to 500 μg, 400 to 600 μg, 400 to 700 μg, 400 to 800 μg, 400 to 900 μg, 400 to 1000 μg, 400 to 1250 μg, 400 to 1500 μg, 400 to 1750 μg, 400 to 2000 μg, 400 to 2250 μg, 400 to 2500 μg, 400 to 2750 μg, 400 to 3000 μg, 500 to 600 μg, 500 to 700 μg, 500 to 800 μg, 500 to 900 μg, 500 to 1000 μg, 500 to 1250 μg, 500 to 1500 μg, 500 to 1750 μg, 500 to 2000 μg, 500 to 2250 μg, 500 to 2500 μg, 500 to 2750 μg, 500 to 3000 μg, 600 to 700 μg, 600 to 800 μg, 600 to 900 μg, 600 to 1000 μg, 600 to 1250 μg, 600 to 1500 μg, 600 to 1750 μg, 600 to 2000 μg, 600 to 2250 μg, 600 to 2500 μg, 600 to 2750 μg, 600 to 3000 μg, 700 to 800 μg, 700 to 900 μg, 700 to 1000 μg, 700 to 1250 μg. 700 to 1500 μg, 700 to 1750 μg, 700 to 2000 μg, 700 to 2250 μg, 700 to 2500 μg, 700 to 2750 μg, 700 to 3000 μg, 800 to 900 μg, 800 to 1000 μg, 800 to 1250 μg, 800 to 1500 μg, 800 to 1750 μg, 800 to 2000 μg, 800 to 2250 μg, 800 to 2500 μg, 800 to 2750 μg, 800 to 3000 μg, 900 to 1000 μg, 900 to 1250 μg, 900 to 1500 μg, 900 to 1750 μg, 900 to 2000 μg, 900 to 2250 μg, 900 to 2500 μg, 900 to 2750 μg, 900 to 3000 μg, 1000 to 1250 μg, 1000 to 1500 μg, 1000 to 1750 μg, 1000 to 2000 μg, 1000 to 2250 μg, 1000 to 2500 μg, 1000 to 2750 μg, 1000 to 3000 μg, 2 to 500 μg, 50 to 500 μg, 3 to 100 μg, 5 to 20 μg, 5 to 100 μg, 10 μg, 20 μg, 30 μg, 40 μg, 50 μg, 60 μg, 70 μg, 75 μg, 80 μg, 90 μg, 100 μg, 150 μg, 200 μg, 250 μg, 300 μg, 350 μg, 400 g, 450 μg, 500 μg, 550 μg, 600 μg, 650 μg, 700 μg, 750 μg, 800 μg, 850 μg, 900 μg, 950 μg, 1000 μg, 1050 μg, 1100 μg, 1150 μg, 1200 μg, 1250 μg, 1300 μg, 1350 μg, 1400 μg, 1450 μg, 1500 μg, 1550 μg, 1600 μg, 1650 μg, 1700 μg, 1750 μg, 1800 μg, 1850 μg, 1900 μg, 1950 μg, 2000 μg, 2050 μg, 2100 μg, 2150 μg, 2200 μg, 2250 μg, 2300 μg, 2350 μg, 2400 μg, 2450 μg, 2500 μg, 2550 μg, 2600 μg, 2650 μg, 2700 μg, 2750 μg, 2800 μg, 2850 μg, 2900 μg, 2950 μg, 3000 μg, 3250 μg, 3500 μg, 3750 μg, 4000 μg, 4250 μg, 4500 μg, 4750 μg, 5000 μg of a peptide or agonist described herein and from 50 mg to 650 mg (e.g. 50 mg, 100 mg, 150 mg, 200 mg, 250 mg, 300 mg, 350 mg, 400 mg, 450 mg, 500 mg, 550 mg, 600 mg) of Modulon® (trimebutine maleate).

[0336] A dosage unit (e.g. an oral dosage unit) can include, for example, from 1 to 30 μg, 1 to 40 μg, 1 to 50 μg, 1 to 100 μg, 1 to 200 μg, 1 to 300 μg, 1 to 400 μg, 1 to 500 μg, 1 to 600 μg, 1 to 700 μg, 1 to 800 μg, 1 to 900 μg, 1 to 1000 μg, 10 to 30 μg, 10 to 40 μg, 10 to 50 μg, 10 to 100 μg, 10 to 200 μg, 10 to 300 μg, 10 to 400 μg, 10 to 500 μg, 10 to 600 μg, 10 to 700 μg, 10 to 800 μg, 10 to 900 μg, 10 to 1000 μg, 100 to 200 μg, 100 to 300 μg, 100 to 400 μg, 100 to 500 μg, 100 to 600 μg, 100 to 700 μg, 100 to 800 μg, 100 to 900 μg, 100 to 1000 μg, 100 to 1250 μg, 100 to 1500 μg, 100 to 1750 μg, 100 to 2000 μg, 1100 to 2250 μg, 100 to 2500 μg, 100 to 2750 μg, 100 to 3000 μg, 200 to 300 μg, 200 to 400 μg, 200 to 500 μg, 200 to 600 μg, 200 to 700 μg, 200 to 800 μg, 200 to 900 μg, 200 to 1000 μg, 200 to 1250 μg, 200 to 1500 μg, 200 to 1750 μg, 200 to 2000 μg, 200 to 2250 μg, 200 to 2500 μg, 200 to 2750 μg, 200 to 3000 μg, 300 to 400 μg, 300 to 500 μg, 300 to 600 μg, 300 to, 700 μg, 300 to 800 μg, 300 to 900 μg, 300 to 1000 μg, 300 to 1250 μg, 300 to 1500 μg, 300 to 1750 μg, 300 to 2000 μg, 300 to 2250 μg, 300 to 2500 μg, 300 to 2750 μg, 300 to 3000 μg, 400 to 500 μg, 400 to 600 μg, 400 to 700 μg, 400 to 800 μg; 400 to 900 μg, 400 to 1000 μg, 400 to 1250 μg, 400 to 1500 μg, 400 to 1750 μg, 400 to 2000 μg, 400 to 2250 μg, 400 to 2500 μg, 400 to 2750 μg, 400 to 3000 μg, 500 to 600 μg, 500 to 700 μg, 500 to 800 μg, 500 to 900 μg, 500 to 1000 μg, 500 to 1250 μg, 500 to 1500 μg, 500 to 1750 μg, 500 to 2000 μg, 500 to 2250 μg, 500 to 2500 μg, 500 to 2750 μg, 500 to 3000 μg, 600 to 700 μg, 600 to 800 μg, 600 to 900 μg, 600 to 1000 μg, 600 to 1250 μg, 600 to 1500 μg, 600 to 1750 μg, 600 to 2000 μg, 600 to 2250 μg, 600 to 2500 μg, 600 to 2750 μg, 600 to 3000 μg, 700 to 800 μg, 700 to 900 μg, 700 to 1000 μg, 700 to 1250 μg, 700 to 1500 μg, 700 to 1750 μg, 700 to 2000 μg, 700 to 2250 μg, 700 to 2500 μg, 700 to 2750 μg, 700 to 3000 μg, 800 to 900 μg, 800 to 1000 μg, 800 to 1250 μg, 800 to 1500 μg, 800 to 1750 μg, 800 to 2000 μg, 800 to 2250 μg, 800 to 2500 μg, 800 to 2750 μg, 800 to 3000 μg, 900 to 1000 μg, 900 to 1250 μg, 900 to 1500 μg, 900 to 1750 μg, 900 to 2000 μg, 900 to 2250 μg, 900 to 2500 μg, 900 to 2750 μg, 900 to 3000 μg, 1000 to 1250 μg, 1000 to 1500 μg, 1000 to 1750 μg, 1000 to 2000 μg, 1000 to 2250 μg, 1000 to 2500 μg, 1000 to 2750 μg, 1000 to 3000 μg, 2 to 500 μg, 50 to 500 μg, 3 to 100 μg, 5 to 20 μg, 5 to 100 μg, 10 μg, 20 μg, 30 μg, 40 μg, 50 μg, 60 μg, 70 μg, 75 μg, 80 μg, 90 μg, 100 μg, 150 μg, 200 μg, 250 μg, 300 μg, 350 μg, 400 μg, 450 μg, 500 μg, 550 μg, 600 μg, 650 μg, 700 μg, 750 μg, 800 μg, 850 μg, 900 μg, 950 μg, 1000 μg, 1050 μg, 1100 μg, 1150 μg, 1200 μg, 1250 μg, 1300 μg, 1350 μg, 1400 μg, 1450 μg, 1500 μg, 1550 μg, 1600 μg, 1650 μg, 1700 μg, 1750 μg, 1800 μg, 1850 μg, 1900 μg, 1950 μg, 2000 μg, 2050 μg, 2100 μg, 2150 μg, 2200 μg, 2250 μg, 2300 μg, 2350 μg, 2400 μg, 2450 μg, 2500 μg, 2550 μg, 2600 μg, 2650 μg, 2700 μg, 2750 μg, 2800 μg, 2850 μg, 2900 μg, 2950 μg, 3000 μg, 3250 μg, 3500 μg, 3750 μg, 4000 μg, 4250 μg, 4500 μg, 4750 μg, 5000 μg of a peptide or agonist described herein and from 1 mg to 80 mg (e.g. 1 mg, 5 mg, 10 mg, 15 mg, 20 mg, 25 mg, 30 mg, 35 mg, 40 mg, 45 mg, 50 mg, 55 mg, 60 mg, 65 mg, 70 mg, 75 mg, 80 mg) of Propulsid® (cisapride).

[0337] A dosage unit (e.g. an oral dosage unit) can include, for example, from 1 to 30 μg, 1 to 40 μg, 1 to 50 μg, 1 to 100 μg, 1 to 200 μg, 1 to 300 μg, 1 to 400 μg, 1 to 500 μg, 1 to 600 μg, 1 to 700 μg, 1 to 800 μg, 1 to 900 μg, 1 to 1000 μg, 10 to 30 μg, 10 to 40 μg, 10 to 50 μg, 10 to 100 μg, 10 to 200 μg, 10 to 300 μg, 10 to 400 μg, 10 to 500 μg, 10 to 600 μg, 10 to 700 μg, 10 to 800 μg, 10 to 900 μg, 10 to 1000 μg, 100 to 200 μg, 100 to 300 μg, 100 to 400 μg, 100 to 500 μg, 100 to 600 μg, 100 to 700 μg, 100 to 800 μg, 100 to 900 μg, 100 to 1000 μg, 100 to 1250 μg, 100 to 1500 μg, 100 to 1750 μg, 100 to 2000 μg, 100 to 2250 μg, 100 to 2500 μg, 100 to 2750 μg, 100 to 3000 μg, 200 to 300 μg, 200 to 400 μg, 200 to 500 μg, 200 to 600 μg, 200 to 700 μg, 200 to 800 μg, 200 to 900 μg, 200 to 1000 μg, 200 to 1250 μg, 200 to 1500 μg, 200 to 1750 μg, 200 to 2000 μg, 200 to 2250 μg, 200 to 2500 μg, 200 to 2750 μg, 200 to 3000 μg, 300 to 400 μg, 300 to 500 μg, 300 to 600 μg, 300 to 700 μg, 300 to 800 μg, 300 to 900 μg, 300 to 1000 μg, 300 to 1250 μg, 300 to 1500 μg, 300 to 1750 μg, 300 to 2000 μg, 300 to 2250 μg, 300 to 2500 μg, 300 to 2750 μg, 300 to 3000 μg, 400 to 500 μg, 400 to 600 μg, 400 to 700 μg, 400 to 800 μg, 400 to 900 μg, 400 to 1000 μg, 400 to 1250 μg, 400 to 1500 μg, 400 to 1750 μg, 400 to 2000 μg, 400 to 2250 μg, 400 to 2500 μg, 400 to 2750 μg, 400 to 3000 μg, 500 to 600 μg, 500 to 700 μg, 500 to 800 μg, 500 to 900 μg, 500 to 1000 μg, 500 to 1250 μg, 500 to 1500 μg, 500 to 1750 μg, 500 to 2000 μg, 500 to 2250 μg, 500 to 2500 μg, 500 to 2750 μg, 500 to 3000 μg, 600 to 700 μg, 600 to 800 μg, 600 to 900 μg, 600 to 1000 μg, 600 to 1250 μg, 600 to 1500 μg, 600 to 1750 μg, 600 to 2000 μg, 600 to 2250 μg, 600 to 2500 μg, 600 to 2750 μg, 600 to 3000 μg, 700 to 800 μg, 700 to 900 μg, 700 to 1000 μg, 700 to 1250 μg, 700 to 1500 μg, 700 to 1750 μg, 700 to 2000 μg, 700 to 2250 μg, 700 to 2500 μg, 700 to 2750 μg, 700 to 3000 μg, 800 to 900 μg, 800 to 1000 μg, 800 to 1250 μg, 800 to 1500 μg, 800 to 1750 μg, 800 to 2000 μg, 800 to 2250 μg, 800 to 2500 μg, 800 to 2750 μg, 800 to 3000 μg, 900 to 1000 μg, 900 to 1250 μg, 900 to 1500 μg, 900 to 1750 μg, 900 to 2000 μg, 900 to 2250 μg, 900 to 2500 μg, 900 to 2750 μg, 900 to 3000 μg, 1000 to 1250 μg, 1000 to 1500 μg, 1000 to 1750 μg, 1000 to 2000 μg, 1000 to 2250 μg, 1000 to 2500 μg, 1000 to 2750 μg, 1000 to 3000 μg, 2 to 500 μg, 50 to 500 μg, 3 to 100 μg, 5 to 20 μg, 5 to 100 μg, 10 μg, 20 μg, 30 μg, 40 μg, 50 μg, 60 μg, 70 μg, 75 μg, 80 μg, 90 μg, 100 μg, 150 μg, 200 μg, 250 μg, 300 μg, 350 μg, 400 μg, 450 μg, 500 μg, 550 μg, 600 μg, 650 μg, 700 μg, 750 μg, 800 μg, 850 μg, 900 μg, 950 μg, 1000 μg, 1050 μg, 1100 μg, 1150 μg, 1200 μg, 1250 μg, 1300 μg, 1350 μg, 1400 μg, 1450 μg, 1500 μg, 1550 μg, 1600 μg, 1650 μg, 1700 μg, 1750 μg, 1800 μg, 1850 μg, 1900 μg, 1950 μg, 2000 μg, 2050 μg, 2100 μg, 2150 μg, 2200 μg, 2250 μg, 2300 μg, 2350 μg, 2400 μg, 2450 μg, 2500 μg, 2550 μg, 2600 μg, 2650 μg, 2700 μg, 2750 μg, 2800 μg, 2850 μg, 2900 μg, 2950 μg, 3000 μg, 3250 μg, 3500 μg, 3750 μg, 4000 μg, 4250 μg, 4500 μg, 4750 μg, 5000 μg of a peptide or agonist described herein and from 10 mg to 600 mg (e.g. 10 mg, 20 mg, 30 mg, 40 mg, 50 mg, 60 mg, 70 mg, 80 mg, 90 mg, 100 mg, 110 mg, 120 mg, 130 mg, 140 mg, 150 mg, 160 mg, 200 mg, 250 mg, 300 mg, 350 mg, 400 mg, 450 mg, 500 mg, 550 mg, 600 mg) of Bentyl®/Bentylol® (diciclomine).

[0338] A dosage unit (e.g. an oral dosage unit) can include, for example, from 1 to 30 μg, 1 to 40 μg, 1 to 50 μg, 1 to 100 μg, 1 to 200 μg, 1 to 300 μg, 1 to 400 μg, 1 to 500 μg, 1 to 600 μg, 1 to 700 μg, 1 to 800 μg, 1 to 900 μg, 1 to 1000 μg, 10 to 30 μg, 10 to 40 μg, 10 to 50 μg, 10 to 100 μg, 10 to 200 μg, 10 to 300 μg, 10 to 400 μg, 10 to 500 μg, 10 to 600 μg, 10 to 700 μg, 10 to 800 μg, 10 to 900 μg, 10 to 1000 μg, 100 to 200 μg, 100 to 300 μg, 100 to 400 μg, 100 to 500 μg, 100 to 600 μg, 100 to 700 μg, 100 to 800 μg, 100 to 900 μg, 1100 to 1000 μg, 100 to 1250 μg, 100 to 1500 μg, 100 to 1750 μg, 100 to 2000 μg, 100 to 2250 μg, 100 to 2500 μg, 100 to 2750 μg, 100 to 3000 μg, 200 to 300 μg, 200 to 400 μg, 200 to 500 μg, 200 to 600 μg, 200 to 700 μg, 200 to 800 μg, 200 to 900 μg, 200 to 1000 μg, 200 to 1250 μg, 200 to 1500 μg, 200 to 1750 μg, 200 to 2000 μg, 200 to 2250 μg, 200 to 2500 μg, 200 to 2750 μg, 200 to 3000 μg, 300 to 400 μg, 300 to 500 μg, 300 to 600 μg, 300 to 700 μg, 300 to 800 μg, 300 to 900 μg, 300 to 1000 μg, 300 to 1250 μg, 300 to 1500 μg, 300 to 1750 μg, 300 to 2000 μg, 300 to 2250 μg, 300 to 2500 μg, 300 to 2750 μg, 300 to 3000 μg, 400 to 500 μg, 400 to 600 μg, 400 to 700 μg, 400 to 800 μg, 400 to 900 μg, 400 to 1000 μg, 400 to 1250 μg, 400 to 1500 μg, 400 to 1750 μg, 400 to 2000 μg, 400 to 2250 μg, 400 to 2500 μg, 400 to 2750 μg, 400 to 3000 μg, 500 to 600 μg, 500 to 700 μg, 500 to 800 μg, 500 to 900 μg, 500 to 1000 μg, 500 to 1250 μg, 500 to 1500 μg, 500 to 1750 μg, 500 to 2000 μg, 500 to 2250 μg, 500 to 2500 μg, 500 to 2750 μg, 500 to 3000 μg, 600 to 700 μg, 600 to 800 μg, 600 to 900 μg, 600 to 1000 μg, 660 to 1250 μg, 600 to 1500 μg, 600 to 1750 μg, 600 to 2000 μg, 600 to 2250 μg, 600 to 2500 μg, 600 to 2750 μg, 600 to 3000 μg, 700 to 800 μg, 700 to 900 μg, 700 to 1000 μg, 700 to 1250 μg, 700 to 1500 μg, 700 to 1750 μg, 700 to 2000 μg, 700 to 2250 μg, 700 to 2500 μg, 700 to 2750 μg, 700 to 3000 μg, 800 to 900 μg, 800 to 1000 μg, 800 to 1250 μg, 800 to 1500 μg, 800 to 1750 μg, 800 to 2000 μg, 800 to 2250 μg, 800 to 2500 μg, 800 to 2750 μg, 800 to 3000 μg, 900 to 1000 μg, 900 to 1250 μg, 900 to 1500 μg, 900 to 1750 μg, 900 to 2000 μg, 900 to 2250 μg, 900 to 2500 μg, 900 to 2750 μg, 900 to 3000 μg, 1000 to 1250 μg, 1000 to 1500 μg, 1000 to 1750 μg, 1000 to 2000 μg, 1000 to 2250 μg, 1000 to 2500 μg, 1000 to 2750 μg, 1000 to 3000 μg, 2 to 500 μg, 50 to 500 μg, 3 to 100 μg, 5 to 20 μg, 5 to 100 μg, 10 μg, 20 μg, 30 μg, 40 μg, 50 μg, 60 μg, 70 μg, 75 μg, 80 μg, 90 μg, 100 μg, 150 μg, 200 μg, 250 μg, 300 μg, 350 μg, 400 μg, 450 μg, 500 μg, 550 μg, 600 μg, 650 μg, 700 μg, 750 μg, 800 μg, 850 μg, 900 μg, 950 μg, 1000 μg, 1050 μg, 1100 μg, 1150 μg, 1200 μg, 1250 μg, 1300 μg, 1350 μg, 1400 μg, 1450 μg, 1500 μg, 1550 μg, 1600 μg, 1650 μg, 1700 μg, 1750 μg, 1800 μg, 1850 μg, 1900 μg, 1950 μg, 2000 μg, 2050 μg, 2100 μg, 2150 μg, 2200 μg, 2250 μg, 2300 μg, 2350 μg, 2400 μg; 2450 μg, 2500 μg, 2550 μg, 2600 μg, 2650 μg, 2700 μg, 2750 μg, 2800 μg, 2850 μg, 2900 μg, 2950 μg, 3000 μg, 3250 μg, 3500 μg, 3750 μg, 4000 μg, 4250 μg, 4500 μg, 4750 μg, 5000 μg of a peptide or agonist described herein and from 1 mg to 25 mg (e.g. 1 mg, 2 mg, 3 mg, 4 mg, 5 mg, 6 mg, 7 mg, 8 mg, 9 mg, 10 mg, 11 mg, 12 mg, 13 mg, 14 mg, 15 mg, 16 mg, 17 mg, 18 mg, 19 mg, 20 mg, 21 mg, 22 mg, 23 mg, 24 mg, 25 mg) of Questran® (cholestyramine).

[0339] A dosage unit (e.g. an oral dosage unit) can include, for example, from 1 to 30 μg, 1 to 40 μg, 1 to 50 μg, 1 to 100 μg, 1 to 200 μg, 1 to 300 μg, 1 to 400 μg, 1 to 500 μg, 1 to 600 μg, 1 to 700 μg, 1 to 800 μg, 1 to 900 μg, 1 to 1000 μg, 10 to 30 μg, 10 to 40 μg, 10 to 50 μg, 10 to 100 μg, 10 to 200 μg, 10 to 300 μg, 10 to 400 μg, 10 to 500 μg, 10 to 600 μg, 10 to 700 μg, 10 to 800 μg, 10 to 900 μg, 10 to 1000 μg, 100 to 200 μg, 100 to 300 μg, 100 to 400 μg, 100 to 500 μg, 100 to 600 μg, 100 to 700 μg, 100 to 800 μg, 100 to 900 μg, 100 to 1000 μg, 100 to 1250 μg, 100 to 1500 μg, 100 to 1750 μg, 100 to 2000 μg, 100 to 2250 μg, 100 to 2500 μg, 100 to 2750 μg, 100 to 3000 μg, 200 to 300 μg, 200 to 400 μg, 200 to 500 μg, 200 to 600 μg, 200 to 700 μg, 200 to 800 μg, 200 to 900 μg, 200 to 1000 μg, 200 to 1250 μg, 200 to 1500 μg, 200 to 1750 μg, 200 to 2000 μg, 200 to 2250 μg, 200 to 2500 μg, 200 to 2750 μg, 200 to 3000 μg, 300 to 400 μg, 300 to 500 μg, 300 to 600 μg, 300 to 700 μg, 300 to 800 μg, 300 to 900 μg, 300 to 1000 μg, 300 to 1250 μg, 300 to 1500 μg, 300 to 1750 μg, 300 to 2000 μg, 300 to 2250 μg, 300 to 2500 μg, 300 to 2750 μg, 300 to 3000 μg, 400 to 500 μg, 400 to 600 μg, 400 to 700 μg, 400 to 800 μg, 400 to 900 μg, 400 to 1000 μg, 400 to 1250 μg, 400 to 1500 μg, 400 to 1750 μg, 400 to 2000 μg, 400 to 2250 μg, 400 to 2500 μg, 400 to 2750 μg, 400 to 3000 μg, 500 to 600 μg, 500 to 700 μg, 500 to 800 μg, 500 to 900 μg, 500 to 1000 μg, 500 to 1250 μg, 500 to 1500 μg, 500 to 1750 μg, 500 to 2000 μg, 500 to 2250 μg, 500 to 2500 μg, 500 to 2750 μg, 500 to 3000 μg, 600 to 700 μg, 600 to 800 μg, 600 to 900 μg, 600 to 1000 μg, 600 to 1250 μg, 600 to 1500 μg, 600 to 1750 μg, 600 to 2000 μg, 600 to 2250 μg, 600 to 2500 μg, 600 to 2750 μg, 600 to 3000 μg, 700 to 800 μg, 700 to 900 μg, 700 to 1000 μg, 700 to 1250 μg, 700 to 1500 μg, 700 to 1750 μg, 700 to 2000 μg, 700 to 2250 μg, 700 to 2500 μg, 700 to 2750 μg, 700 to 3000 μg, 800 to 900 μg, 800 to 1000 μg, 800 to 1250 μg, 800 to 1500 μg, 800 to 1750 μg, 800 to 2000 μg, 800 to 2250 μg, 800 to 2500 μg, 800 to 2750 μg, 800 to 3000 μg, 900 to 1000 μg, 900 to 1250 μg, 900 to 1500 μg, 900 to 1750 μg, 900 to 2000 μg, 900 to 2250 μg, 900 to 2500 μg, 900 to 2750 μg, 900 to 3000 μg, 1000 to 1250 μg, 1000 to 1500 μg, 1000 to 1750 μg, 1000 to 2000 μg, 1000 to 2250 μg, 1000 to 2500 μg, 1000 to 2750 μg, 1000 to 3000 μg, 2 to 500 μg, 50 to 500 μg, 3 to 100 μg, 5 to 20 μg, 5 to 100 μg, 10 μg, 20 μg, 30 μg, 40 μg, 50 μg, 60 μg, 70 μg, 75 μg, 80 μg, 90 μg, 100 μg, 150 μg, 200 μg, 250 μg, 300 μg, 350 μg, 400 μg, 450 μg, 500 μg, 550 μg, 600 μg, 650 μg, 700 μg, 750 μg, 800 μg, 850 μg, 900 μg, 950 μg, 1000 μg, 1050 μg, 1100 μg, 1150 μg, 1200 μg, 1250 μg, 1300 μg, 1350 μg, 1400 μg, 1450 μg, 1500 μg, 1550 μg, 1600 μg, 1650 μg, 1700 μg, 1750 μg, 1800 μg, 1850 μg, 1900 μg, 1950 μg, 2000 μg, 2050 μg, 2100 μg, 2150 μg, 2200 μg, 2250 μg, 2300 μg, 2350 μg, 2400 μg, 2450 μg, 2500 μg, 2550 μg, 2600 μg, 2650 μg, 2700 μg, 2750 μg, 2800 μg, 2850 μg, 2900 μg, 2950 μg, 3000 μg, 3250 μg, 3500 μg, 3750 μg, 4000 μg, 4250 μg, 4500 μg, 4750 μg, 5000 μg of a peptide or agonist described herein and from 100 mg to 3000 mg (e.g. 100 mg, 200 mg, 300 mg, 400 mg, 500 mg, 600 mg, 625 mg, 700 mg, 800 mg, 900 mg, 1000 mg, 1250 mg, 1300 mg, 1400 mg, 1500 mg, 1600 mg, 1700 mg, 1800 mg, 1875 mg, 1900 mg, 2000 mg, 2100 mg, 2200 mg, 2300 mg, 2400 mg, 2500 mg,) of Equalactin®/Fibercon® (Calcium Polycarbophil).

[0340] A dosage unit (e.g. an oral dosage unit) can include, for example, from 1 to 30 μg, 1 to 40 μg, 1 to 50 μg, 1 to 100 μg, 1 to 200 μg, 1 to 300 μg, 1 to 400 μg, 1 to 500 μg, 1 to 600 μg, 1 to 700 μg, 1 to 800 μg, 1 to 900 μg, 1 to 1000 μg, 10 to 30 μg, 10 to 40 μg, 10 to 50 μg, 10 to 100 μg, 10 to 200 μg, 10 to 300 μg, 10 to 400 μg, 10 to 500 μg, 10 to 600 μg, 10 to 700 μg, 10 to 800 μg, 10 to 900 μg, 10 to 1000 μg, 100 to 200 μg, 100 to 300 μg, 100 to 400 μg, 100 to 500 μg, 100 to 600 μg, 100 to 700 μg, 100 to 800 μg, 100 to 900 μg, 100 to 1000 μg, 100 to 1250 μg, 100 to 1500 μg, 100 to 1750 μg, 100 to 2000 μg, 100 to 2250 μg, 100 to 2500 μg, 100 to 2750 μg, 100 to 3000 μg, 200 to 300 μg, 200 to 400 μg, 200 to 500 μg, 200 to 600 μg, 200 to 700 μg, 200 to 800 μg, 200 to 900 μg, 200 to 1000 μg, 200 to 1250 μg, 200 to 1500 μg, 200 to 1750 μg, 200 to 2000 μg, 200 to 2250 μg, 200 to 2500 μg, 200 to 2750 μg, 200 to 3000 μg, 300 to 400 μg, 300 to 500 μg, 300 to 600 μg, 300 to 700 μg, 300 to 800 μg, 300 to 900 μg, 300 to 1000 μg, 300 to 1250 μg, 300 to 1500 μg, 300 to 1750 μg, 300 to 2000 μg, 300 to 2250 μg, 300 to 2500 μg, 300 to 2750 μg, 300 to 3000 μg, 400 to 500 μg, 400 to 600 μg, 400 to 700 μg, 400 to 800 μg, 400 to 900 μg, 400 to 1000 μg, 400 to 1250 μg, 400 to 1500 μg, 400 to 1750 μg, 400 to 2000 μg, 400 to 2250 μg, 400 to 2500 μg, 400 to 2750 μg, 400 to 3000 μg, 500 to 600 μg, 500 to 700 μg, 500 to 800 μg, 500 to 900 μg, 500 to 1000 μg, 500 to 1250 μg, 500 to 1500 μg, 500 to 1750 μg, 500 to 2000 μg, 500 to 2250 μg, 500 to 2500 μg, 500 to 2750 μg, 500 to 3000 μg, 600 to 700 μg, 600 to 800 μg, 600 to 900 μg, 600 to 1000 μg, 600 to 1250 μg, 600 to 1500 μg, 600 to 1750 μg, 600 to 2000 μg, 600 to 2250 μg, 600 to 2500 μg, 600 to 2750 μg, 600 to 3000 μg, 700 to 800 μg, 700 to 900 μg, 700 to 1000 μg, 700 to 1250 μg, 700 to 1500 μg, 700 to 1750 μg, 700 to 2000 μg, 700 to 2250 μg, 700 to 2500 μg, 700 to 2750 ∞g, 700 to 3000 μg, 800 to 900 μg, 800 to 1000 μg, 800 to 1250 μg, 800 to 1500 μg, 800 to 1750 μg, 800 to 2000 μg, 800 to 2250 μg, 800 to 2500 μg, 800 to 2750 μg, 800 to 3000 μg, 900 to 1000 μg, 900 to 1250 μg, 900 to 1500 μg, 900 to 1750 μg, 900 to 2000 μg, 900 to 2250 μg, 900 to 2500 μg, 900 to 2750 μg, 900 to 3000 μg, 1000 to 1250 μg, 1000 to 1500 μg, 1000 to 1750 μg, 1000 to 2000 μg, 1000 to 2250 μg, 1000 to 2500 μg, 1000 to 2750 μg, 1000 to 3000 μg, 2 to 500 μg, 50 to 500 μg, 3 to 100 μg, 5 to 20 μg, 5 to 100 μg, 10 μg, 20 μg, 30 μg, 40 μg, 50 μg, 60 μg, 70 μg, 75 μg, 80 μg, 90 μg, 100 μg, 150 μg, 200 μg, 250 μg, 300 μg, 350 μg, 400 μg, 450 μg, 500 μg, 550 μg, 600 μg, 650 μg, 700 μg, 750 μg, 800 μg, 850 μg, 900 μg, 950 μg, 1000 μg, 1050 μg, 1100 μg, 1150 μg, 1200 μg, 1250 μg, 1300 μg, 1350 μg, 1400 μg, 1450 μg, 1500 μg, 1550 μg, 1600 μg, 1650 μg, 1700 μg, 1750 μg, 1800 μg, 1850 μg, 1900 μg, 1950 μg, 2000 μg, 2050 μg, 2100 μg, 2150 μg, 2200 μg, 2250 μg, 2300 μg, 2350 μg, 2400 μg, 2450 μg, 2500 μg, 2550 μg, 2600 μg, 2650 μg, 2700 μg, 2750 μg, 2800 μg, 2850 μg, 2900 μg, 2950 μg, 3000 μg, 3250 μg, 3500 μg, 3750 μg, 4000 μg, 4250 μg, 4500 μg, 4750 μg, 5000 μg of a peptide or agonist described herein and from 1 mg to 20 mg (e.g. 1 mg, 2 mg, 2.5 mg, 3 mg, 4 mg, 5 mg, 6 mg, 7 mg, 7.5 mg, 8 mg, 9 mg, 10 mg, 11 mg, 12 mg, 12.5 mg, 13 mg, 14 mg, 15 mg, 16 mg, 17.5 mg, 18 mg, 19 mg, 20 mg) of darifenacin (Enablex®).

[0341] A dosage unit (e.g. an oral dosage unit) can include, for example, from 1 to 30 μg, 1 to 40 μg, 1 to 50 μg, 1 to 100 μg, 1 to 200 μg, 1 to 300 μg, 1 to 400 μg, 1 to 500 μg, 1 to 600 μg, 1 to 700 μg, 1 to 800 μg, 1 to 900 μg, 1 to 1000 μg, 10 to 30 μg, 100 to 40 μg, 10 to 50 μg, 10 to 100 μg, 10 to 200 μg, 10 to 300 μg, 10 to 400 μg, 10 to 500 μg, 10 to 600 μg, 10 to 700 μg, 10 to 800 μg, 10 to 900 μg, 10 to 1000 μg, 100 to 200 μg, 100 to 300 μg, 100 to 400 μg, 100 to 500 μg, 100 to 600 μg, 100 to 700 μg, 100 to 800 μg, 100 to 900 μg, 100 to 1000 μg, 100 to 1250 μg, 100 to 1500 μg, 100 to 1750 μg, 100 to 2000 μg, 100 to 2250 μg, 100 to 2500 μg, 100 to 2750 μg, 100 to 3000 μg, 200 to 300 μg, 200 to 400 μg, 200 to 500 μg, 200 to 600 μg, 200 to 700 μg, 200 to 800 μg, 200 to 900 μg, 200 to 1000 μg, 200 to 1250 μg, 200 to 1500 μg, 200 to 1750 μg, 200 to 2000 μg, 200 to 2250 μg, 200 to 2500 μg, 200 to 2750 μg, 200 to 3000 μg, 300 to 400 μg, 300 to 500 μg, 300 to 600 μg, 300 to 700 μg, 300 to 800 μg, 300 to 900 μg, 300 to 1000 μg, 300 to 1250 μg, 300 to 1500 μg, 300 to 1750 μg, 300 to 2000 μg, 300 to 2250 μg, 300 to 2500 μg, 300 to 2750 μg, 300 to 3000 μg, 400 to 500 μg, 400 to 600 μg, 400 to 700 μg, 400 to 800 μg, 400 to 900 μg, 400 to 1000 μg, 400 to 1250 μg, 400 to 1500 μg, 400 to 1750 μg, 400 to 2000 μg, 400 to 2250 μg, 400 to 2500 μg, 400 to 2750 μg, 400 to 3000 μg, 500 to 600 μg, 500 to 700 μg, 500 to 800 μg, 500 to 900 μg, 500 to 1000 μg, 500 to 1250 μg, 500 to 1500 μg, 500 to 1750 μg, 500 to 2000 μg, 500 to 2250 μg, 500 to 2500 μg, 500 to 2750 μg, 500 to 3000 μg, 600 to 700 μg, 600 to 800 μg, 600 to 900 μg, 600 to 1000 μg, 600 to 1250 μg, 600 to 1500 μg, 600 to 1750 μg, 600 to 2000 μg, 600 to 2250 μg, 600 to 2500 μg, 600 to 2750 ηg, 600 to 3000 μg, 700 to 800 μg, 700 to 900 μg, 700 to 1000 μg, 700 to 1250 μg, 700 to 1500 μg, 700 to 1750 μg, 700 to 2000 μg, 700 to 2250 μg, 700 to 2500 μg, 700 to 2750 μg, 700 to 3000 μg, 800 to 900 μg, 800 to 1000 μg, 800 to 1250 μg, 800 to 1500 μg, 800 to 1750 μg, 800 to 2000 μg, 800 to 2250 μg, 800 to 2500 μg, 800 to 2750 μg, 800 to 3000 μg, 900 to 1000 μg, 900 to 1250 μg, 900 to 1500 μg, 900 to 1750 μg, 900 to 2000 μg, 900 to 2250 μg, 900 to 2500 μg, 900 to 2750 μg, 900 to 3000 μg, 1000 to 1250 μg, 1000 to 1500 μg, 1000 to 1750 μg, 1000 to 2000 μg, 1000 to 2250 μg, 1000 to 2500 μg, 1000 to 2750 μg, 1000 to 3000 μg, 2 to 500 μg, 50 to 500 μg, 3 to 100 μg, 5 to 20 μg 5 to 100 μg, 10 μg, 20 μg, 30 μg, 40 μg, 50 μg, 60 μg, 70 μg, 75g, 80 μg, 90g, 100 μg, 150 μg, 200 μg, 250 μg, 300 μg, 350 μg, 400 μg, 450 μg, 500 μg, 550 μg, 600 μg, 650 μg, 700 μg, 750 μg, 800 μg, 850 μg, 900 μg, 950 μg, 1000 μg, 1050 μg, 1100 μg, 1150 μg, 1200 μg, 1250 μg, 1300 μg, 1350 μg, 1400 μg, 1450 μg, 1500 μg, 1550 μg, 1600 μg, 1650 μg, 1700 μg, 1750 μg, 1800 μg, 1850 μg, 1900 μg, 1950 μg, 2000 μg, 2050 μg, 2100 μg, 2150 μg, 2200 μg, 2250 μg, 2300 μg, 2350 μg, 2400 μg, 2450 μg, 2500 μg, 2550 μg, 2600 μg, 2650 μg, 2700 μg, 2750 μg, 2800 μg, 2850 μg, 2900 μg, 2950 μg, 3000 μg, 3250 μg, 3500 μg, 3750 μg, 4000 μg, 4250 μg, 4500 μg, 4750 μg, 5000 μg of a peptide or agonist described herein and from 1 mg to 250 mg (e.g. 1 mg, 2 mg, 3 mg, 4 mg, 5 mg, 6 mg, 7 mg, 8 mg, 9 mg, 10 mg, 20 mg, 30 mg, 40 mg, 50 mg, 60 mg, 70 mg, 80 mg, 90 mg, 100 mg, 110 0 mg, 120 mg, 130 mg, 140 mg, 150 mg, 160 mg, 170 mg, 180 mg, 190 mg, 200 mg, 210 mg, 220 mg, 230 mg, 240 mg, 250 mg) of Ondansetron HCl (Zofran®).

[0342] A dosage unit (e.g. an oral dosage unit) can include, for example, from 1 to 30 μg, 1 to 40 μg, 1 to 50 μg, 1 to 100 μg, 1 to 200 μg, 1 to 300 μg, 1 to 400 μg, 1 to 500 μg, 1 to 600 g, 1 to 700 μg, 1 to 800 μg, 1 to 900 μg, 1 to 1000 μg, 10 to 30 μg, 10 to 40 μg, 10 to 50 μg, 10 to 100 μg, 10 to 200 μg, 10 to 300 μg, 10 to 400 μg, 10 to 500 μg, 1.0 to 600 μg, 10 to 700 μg, 10 to 800 μg, 10 to 900 μg, 10 to 1000 kg, 100 to 200 μg, 100 to 300 μg, 100 to 400 μg, 100 to 500 μg, 100 to 600 μg, 100 to 700 μg, 100 to 800 μg, 100 to 900 μg, 100 to 1000 μg, 100 to 1250 μg, 100 to 1500 μg, 100 to 1750 μg, 100 to 2000 μg, 100 to 2250 μg, 100 to 2500 μg, 100 to 2750 μg, 100 to 3000 μg, 200 to 300 μg, 200 to 400 μg, 200 to 500 μg, 200 to 600 μg, 200 to 700 μg, 200 to 800 μg, 200 to 900 μg, 200 to 1000 μg, 200 to 1250 μg, 200 to 1500 μg, 200 to 1750 μg, 200 to 2000 μg, 200 to 2250 μg, 200 to 2500 μg, 200 to 2750 μg, 200 to 3000 μg, 300 to 400 μg, 300 to 500 μg, 300 to 600 μg, 300 to 700 μg, 300 to 800 μg, 300 to 900 μg, 300 to 1000 μg, 300 to 1250 μg, 300 to 1500 μg, 300 to 1750 μg, 300 to 2000 μg, 300 to 2250 μg, 300 to 2500 μg, 300 to 2750 μg, 300 to 3000 μg, 400 to 500 μg, 400 to 600 μg, 400 to 700 μg, 400 to 800 μg, 400 to 900 μg, 400 to 1000 μg, 400 to 1250 μg, 400 to 1500 μg, 400 to 1750 μg, 400 to 2000 μg, 400 to 2250 μg, 400 to 2500 μg, 400 to 2750 μg, 400 to 3000 μg, 500 to 600 μg, 500 to 700 μg, 500 to 800 μg, 500 to 900 μg, 500 to 1000 μg, 500 to 1250 μg, 500 to 1500 μg, 500 to 1750 μg, 500 to 2000 μg, 500 to 2250 μg, 500 to 2500 μg, 500 to 2750 μg, 500 to 3000 μg, 600 to 700 μg, 600 to 800 μg, 600 to 900 μg, 600 to 1000 μg, 600 to 1250 μg, 600 to 1500 μg, 600 to 1750 μg, 600 to 2000 μg, 600 to 2250 μg, 600 to 2500 μg, 600 to 2750 μg, 600 to 3000 μg, 700 to 800 μg, 700 to 900 μg, 700 to 1000 μg, 700 to 1250 μg, 700 to 1500 μg, 700 to 1750 μg, 700 to 2000 μg, 700 to 2250 μg, 700 to 2500 μg, 700 to 2750 μg, 700 to 3000 μg, 800 to 900 μg, 800 to 1000 μg, 800 to 1250 μg, 800 to 1500 μg, 800 to 1750 μg, 800 to 2000 μg, 800 to 2250 μg, 800 to 2500 μg, 800 to 2750 μg, 800 to 3000 μg, 900 to 1000 μg, 900 to 1250 μg, 900 to 1500 μg, 900 to 1750 μg, 900 to 2000 μg, 900 to 2250 μg, 900 to 2500 μg, 900 to 2750 μg, 900 to 3000 μg, 1000 to 1250 μg, 1000 to 1500 μg, 1000 to 1750 μg, 1000 to 2000 μg, 1000 to 2250 μg, 1000 to 2500 μg, 1000 to 2750 μg, 1000 to 3000 μg, 2 to 500 μg, 50 to 500 μg, 3 to 100 μg, 5 to 20 μg, 5 to 100 μg, 10 μg, 20 μg, 30 μg, 40 μg, 50 μg, 60 μg, 70 μg, 75 μg, 80 μg, 90 μg, 100 μg, 150 μg, 200 μg, 250 μg, 300 μg, 350 μg, 400 μg, 450 μg, 500 μg, 550 μg, 600 μg, 650 μg, 700 μg, 750 μg, 800 μg, 850 μg, 900 μg, 950 μg, 1000 μg, 1050 μg, 1100 μg, 1150 μg, 1200 μg, 1250 μg, 1300 μg, 1350 μg, 1400 μg, 1450 μg, 1500 μg, 1550 μg, 1600 μg, 1650 μg, 1700 μg, 1750 μg, 1800 μg, 1850 μg, 1900 μg, 1950 μg, 2000 μg, 2050 μg, 2100 μg, 2150 μg, 2200 μg, 2250 μg, 2300 μg, 2350 μg, 2400 μg, 2450 μg, 2500 μg, 2550 μg, 2600 μg, 2650 μg, 2700 μg, 2750 μg, 2800 μg, 2850 μg, 2900 μg, 2950 μg, 3000 μg, 3250 μg, 3500 μg, 3750 μg, 4000 μg, 4250 μg, 4500 μg, 4750 μg, 5000 μg of a peptide or agonist described herein and from 1 mg to 3000 mg (e.g. 1 mg, 2 mg, 3 mg, 4 mg, 5 mg, 6 mg, 7 mg, 8 mg, 9 mg, 10 mg, 20 mg, 30 mg, 40 mg, 50 mg, 60 mg, 70 mg, 80 mg, 90 mg, 100 mg, 200 mg, 250 mg, 300 mg, 350 mg, 400 mg, 450 mg, 500 mg, 750 mg, 1000 mg, 1250 mg, 1500 mg, 1750 mg, 2000 mg, 2250 mg, 2500 mg, 2750 mg, 3000 mg) of Cimetropium (Alginor®).

[0343] A dosage unit (e.g. an oral dosage unit) can include, for example, from 1 to 30 μg, 1 to 40 μg, 1 to 50 μg, 1 to 100 μg, 1 to 200 μg, 1 to 300 μg, 1 to 400 μg, 1 to 500 μg, 1 to 600 μg, 1 to 700 μg, 1 to 800 μg, 1 to 900 μg, 1 to 1000 μg, 10 to 30 μg, 10 to 40 μg, 10 to 50 μg, 10 to 100 μg, 10 to 200 μg, 10 to 300 μg, 10 to 400 μg, 10 to 500 μg, 10 to 600 μg, 10 to 700 μg, 10 to 800 μg, 10 to 900 μg, 10 to 1000 μg, 100 to 200 μg, 100 to 300 μg, 100 to 400 μg, 100 to 500 ∞g, 100 to 600 μg, 100 to 700 μg, 100 to 800 μg, 100 to 900 μg, 100 to 1000 μg, 100 to 1250 μg, 100 to 1500 μg, 100 to 1750 μg, 100 to 2000 μg, 100 to 2250 μg, 100 to 2500 μg, 100 to 2750 μg, 100 to 3000 μg, 200 to 300 μg, 200 to 400 μg, 200 to 500 μg, 200 to 600 μg, 200 to 700 μg, 200 to 800 μg, 200 to 900 μg, 200 to 1000 μg, 200 to 1250 μg, 200 to 1500 μg, 200 to 1750 μg, 200 to 2000 μg, 200 to 2250 μg, 200 to 2500 μg, 200 to 2750 μg, 200 to 3000 μg, 300 to 400 μg, 300 to 500 μg, 300 to 600 μg, 300 to 700 μg, 300 to 800 μg, 300 to 900 μg, 300 to 1000 μg, 300 to 1250 μg, 300 to 1500 μg, 300 to 1750 μg, 300 to 2000 μg, 300 to 2250 μg, 300 to 2500 μg, 300 to 2750 μg, 300 to 3000 μg, 400 to 500 μg, 400 to 600 μg, 400 to 700 μg, 400 to 800 μg, 400 to 900 μg, 400 to 1000 μg, 400 to 1250 μg, 400 to 15010 μg, 400 to 1750 μg, 400 to 2000 μg, 400 to 2250 μg, 400 to 2500 μg, 400 to 2750 μg, 400 to 3000 μg, 500 to 600 μg, 500 to 700 μg, 500 to 800 μg, 500 to 900 μg, 500 to 1000 μg, 500 to 1250 μg, 500 to 1500 μg, 500 to 1750 μg, 500 to 2000 μg, 500 to 2250 μg, 500 to 2500 μg, 500 to 2750 μg, 500 to 3000 μg, 600 to 700 μg, 600 to 800 μg, 600 to 900 μg, 600 to 1000 μg, 600 to 1250 μg, 600 to 1500 μg, 600 to 1750 μg, 600 to 2000 μg, 600 to 2250 μg, 600 to 2500 μg, 600 to 2750 μg, 600 to 3000 μg, 700 to 800 μg, 700 to 900 μg, 700 to 1000 μg, 700 to 1250 μg, 700 to 1500 μg, 700 to 1750 μg, 700 to 2000 μg, 700 to 2250 μg, 700 to 2500 μg, 700 to 2750 μg, 700 to 3000 μg, 800 to 900 μg, 800 to 1000 μg, 800 to 1250 μg, 800 to 1500 μg, 800 to 1750 μg, 800 to 2000 μg, 800 to 2250 μg, 800 to 2500 μg, 800 to 2750 μg, 800 to 3000 μg, 900 to 1000 μg, 900 to 1250 μg, 900 to 1500 μg, 900 to 1750 μg, 900 to 2000 μg, 900 to 2250 μg, 900 to 2500 μg, 900 to 2750 μg, 900 to 3000 μg, 1000 to 1250 μg, 1000 to 1500 μg, 1000 to 1750 μg, 1000 to 2000 μg, 1000 to 2250 μg, 1000 to 2500 μg, 1000 to 2750 μg, 1000 to 3000 μg, 2 to 500 μg, 50 to 500 μg, 3 to 100 μg, 5 to 20 μg, 5 to 100 μg, 10 μg, 20 μg, 30 μg, 40 μg, 50 μg, 60 μg, 70 μg, 75 μg, 80 μg, 90 μg, 100 μg, 150 μg, 200 μg, 250 μg, 300 μg, 350 μg, 400 μg, 450 μg, 500 μg, 550 μg, 600 μg, 650 μg, 700 μg, 750 μg, 800 μg, 850 μg, 900 μg, 950 μg, 1000 μg, 1050 μg, 1100 μg, 1150 μg, 1200 μg, 1250 μg, 1300 μg, 1350 μg, 1400 μg, 1450 μg, 1500 μg, 1550 μg, 1600 μg, 1650 μg, 1700 μg, 1750 μg, 1800 μg, 1850 μg, 1900 μg, 1950 μg, 2000 μg, 2050 μg, 2100 μg, 2150 μg, 2200 μg, 2250 μg, 2300 μg, 2350 μg, 2400 μg, 2450 μg, 2500 μg, 2550 μg, 2600 μg, 2650 μg, 2700 μg, 2750 μg, 2800 μg, 2850 μg, 2900 μg, 2950 μg, 3000 μg, 3250 μg, 3500 μg, 3750 μg, 4000 μg, 4250 μg, 4500 μg, 4750 μg, 5000 μg of a peptide or agonist described herein and from 1 mg to 1000 mg (e.g. 1 mg, 5 mg, 10 mg, 15 mg, 20 mg, 25 mg, 30 mg, 35 mg, 40 mg, 45 mg, 50 mg, 75 mg, 100 mg, 150 mg, 200 mg, 250 mg, 300 mg, 350 mg, 400 mg, 450 mg, 500 mg, 550 mg, 600 mg, 650 mg, 700 mg, 750 mg, 800 mg, 850 mg, 900 mg, 950 mg, 1000 mg) of Dolasetron (Anzemet®).

[0344] A dosage unit (e.g. an oral dosage unit) can include, for example, from 1 to 30 μg, 1 to 40 μg, 1 to 50 μg, 1 to 100 μg, 1 to 200 μg, 1 to 300 μg, 1 to 400 μg, 1 to 500 μg, 1 to 600 μg, 1 to 700 μg, 1 to 800 μg, 1 to 900 μg, 1 to 1000 μg, 10 to 30 μg, 10 to 40 μg, 10 to 50 μg, 110 to 1100 μg, 110 to 200 μg, 110 to 300 μg, 110 to 400 μg, 110 to 500 μg, 110 to 600 μg, 10 to 700 μg, 10 to 800 μg, 10 to 900 μg, 10 to 1000 μg, 100 to 200 μg, 100 to 300 μg, 100 to 400 μg, 100 to 500 μg, 100 to 600 μg, 100 to 700 μg, 100 to 800 μg, 100 to 900 μg, 100 to 1000 μg, 100 to 1250 μg, 100 to 1500 μg, 100 to 1750 μg, 100 to 2000 μg, 100 to 2250 μg, 100 to 2500 μg, 100 to 2750 μg, 100 to 3000 μg, 200 to 300 μg, 200 to 400 μg, 200 to 500 μg, 200 to 600 μg, 200 to 700 μg, 200 to 800 μg, 200 to 900 μg, 200 to 1000 μg, 200 to 1250 μg, 200 to 1500 μg, 200 to 1750 μg, 200 to 2000 μg, 200 to 2250 μg, 200 to 2500 μg, 200 to 2750 μg, 200 to 3000 μg, 300 to 400g, 300 to 500 μg, 300 to 600 μg, 300 to 700 μg, 300 to 800 μg, 300 to 900 μg, 300 to 1000 μg, 300 to 1250 μg, 300 to 1500 μg, 300 to 1750 μg, 300 to 2000 μg, 300 to 2250 μg, 300 to 2500 μg, 300 to 2750 μg, 300 to 3000 μg, 400 to 500 μg, 400 to 600 μg, 400 to 700 μg, 400 to 800 μg, 400 to 900 μg, 400 to 1000 μg, 400 to 1250 μg, 400 to 1500 μg, 400 to 1750 μg, 400 to 2000 μg, 400 to 2250 μg, 400 to 2500 μg, 400 to 2750 μg, 400 to 3000 μg, 500 to 600 μg, 500 to 700 μg, 500 to 800 μg, 500 to 900 μg, 500 to 1000 μg, 500 to 1250 μg, 500 to 1500 μg, 500 to 1750 μg, 500 to 2000 μg, 500 to 2250 μg, 500 to 2500 μg, 500 to 2750 μg, 500 to 3000 μg, 600 to 700 μg, 600 to 800 μg, 600 to 900 μg, 600 to 1000 μg, 600 to 1250 μg, 600 to 1500 μg, 600 to 1750 μg, 600 to 2000 μg, 600 to 2250 μg, 600 to 2500 μg, 600 to 2750 μg, 600 to 3000 μg, 700 to 800 μg, 700 to 900 μg, 706 to 1000 μg, 700 to 1250 μg, 700 to 1500 μg, 700 to 1750 μg, 700 to 2000 μg, 700 to 2250 μg, 700 to 2500 μg, 700 to 2750 μg, 700 to 3000 μg, 800 to 900 μg, 800 to 1000 μg, 800 to 1250 μg, 800 to 1500 μg, 800 to 1750 μg, 800 to 2000 μg, 800 to 2250 μg, 800 to 2500 μg, 800 to 2750 μg, 800 to 3000 μg, 900 to 1000 μg, 900 to 1250 μg, 900 to 1500 μg, 900 to 1750 μg, 900 to 2000 μg, 900 to 2250 μg, 900 to 2500 μg, 900 to 2750 μg, 900 to 3000 μg, 1000 to 1250 μg, 1000 to 1500 μg, 1000 to 1750 μg, 1000 to 2000 μg, 1000 to 2250 μg, 1000 to 2500 μg, 1000 to 2750 μg, 1000 to 3000 μg, 2 to 500 μg, 50 to 500 μg, 3 to 500 μg, 5 to 20 μg, 5 to 100 μg, 10 μg, 20 μg, 30 μg, 40 μg, 50 μg, 60 μg, 70 μg, 75 μg, 80 μg, 90 μg, 100 μg, 150 μg, 200 μg, 250 μg, 300 μg, 350 μg, 400 μg, 450 μg, 500 μg, 550 μg, 600 μg, 650 μg, 700 μg, 750 μg, 800 μg, 850 μg, 900 μg, 950 μg, 1000 μg, 1050 μg, 1100 μg, 1150 μg, 1200 μg, 1250 μg, 1300 μg, 1350 μg, 1400 μg, 1450 μg, 1500 μg, 1550 μg, 1600 μg, 1650 μg, 1700 μg, 1750 μg, 1800 μg, 1850 μg, 1900 μg, 1950 μg, 2000 μg, 2050 μg, 2100 μg, 2150 μg, 2200 μg, 2250 μg, 2300 μg, 2350 μg, 2400 μg, 2450 μg, 2500 μg, 2550 μg, 2600 μg, 2650 μg, 2700 μg, 2750 μg, 2800 μg, 2850 μg, 2900 μg, 2950 μg, 3000 μg, 3250 μg, 3500 μg, 3750 μg, 4000 μg, 4250 μg, 4500 μg, 4750 μg, 5000 μg of a peptide or agonist described herein and from 1 mg to 180 mg (e.g. 1 mg, 2 mg, 3 mg, 4 mg, 5 mg, 6 mg, 7 mg, 8 mg, 9 mg, 10 mg, 20 mg, 30 mg, 40 mg, 50 mg, 60 mg, 70 mg, 80 mg, 90 mg, 100 mg, 110 mg, 120 mg, 130 mg, 140 mg, 150 mg, 160 mg, 170 mg, 180 mg)of Zelnorm® (tegaserod).

[0345] A dosage unit (e.g. an oral dosage unit) can include, for example, from 1 to 30 μg, 1 to 40 μg, 1 to 50 μg, 1 to 100 μg, 1 to 200 μg, 1 to 300 μg, 1 to 400 μg, 1 to 500 μg, 1 to 600 μg, 1 to 700 μg, 1 to 800 μg, 1 to 900 μg, 1 to 1000 μg, 10 to 30 μg, 10 to 40 μg, 10 to 50 μg, 10 to 100 μg, 10 to 200 μg, 10 to 300 μg, 10 to 400 μg, 10 to 500 μg, 10 to 600 μg, 10 to 700 μg, 10 to 800 μg, 10 to 900 μg, 10 to 1000 μg, 100 to 200 μg, 100 to 300 μg, 100 to 400 μg, 100 to 500 μg, 100 to 600 μg, 100 to 700 μg, 100 to 800 μg, 100 to 900 μg, 100 to 1000 μg, 100 to 1250 μg, 100 to 1500 μg, 100 to 1750 μg, 100 to 2000 μg, 100 to 2250 μg, 100 to 2500 μg, 100 to 2750 μg, 100 to 3000 μg, 200 to 300 μg, 200 to 400 μg, 200 to 500 μg, 200 to 600 μg, 200 to 700 μg, 200 to 800 μg, 200 to 900 μg, 200 to 1000 μg, 200 to 1250 μg, 200 to 1500 μg, 200 to 1750 μg, 200 to 2000 μg, 200 to 2250 μg, 200 to 2500 μg, 200 to 2750 μg, 200 to 3000 μg, 300 to 400 μg, 300 to 500 μg, 300 to 600 μg, 300 to 700 μg, 360 to 800 μg, 300 to 900 μg, 300 to 1000 μg, 300 to 1250 μg, 300 to 1500 μg, 300 to 1750 μg, 300 to 2000 μg, 300 to 2250 μg, 300 to 2500 μg, 300 to 2750 μg, 300 to 3000 μg, 400 to 500 μg, 400 to 600 μg, 400 to 700 μg, 400 to 800 μg, 400 to 900 μg, 400 to 1000 μg, 400 to 1250 μg, 400 to 1500 μg, 400 to 1750 μg, 400 to 2000 μg, 400 to 2250 μg, 400 to 2500 μg, 400 to 2750 μg, 400 to 3000 μg, 500 to 600 μg, 500 to 700 μg, 500 to 800 μg, 500 to 900 μg, 500 to 1000 μg, 500 to 1250 μg, 500 to 1500 μg, 500 to 1750 μg, 500 to 2000 μg, 500 to 2250 μg, 500 to 2500 μg, 500 to 2750 μg, 500 to 3000 μg, 600 to 700 μg, 600 to 800 μg, 600 to 900 μg, 600 to 1000 μg, 600 to 1250 μg, 600 to 1500 μg, 600 to 1750 μg, 600 to 2000 μg, 600 to 2250 μg, 600 to 2500 μg, 600 to 2750 μg, 600 to 3000 μg, 700 to 800 μg, 700 to 900 μg, 700 to 1000 μg, 700 to 1250 μg, 700 to 1500 μg, 700 to 1750 μg, 700 to 2000 μg, 700 to 2250 μg, 700 to 2500 μg, 700 to 2750 μg, 700 to 3000 μg, 800 to 900 μg, 800 to 1000 μg, 800 to 1250 μg, 800 to 1500 μg, 800 to 1750 μg, 800 to 2000 μg, 800 to 2250 μg, 800 to 2500 μg, 800 to 2750 μg, 800 to 3000 μg, 900 to 1000 μg, 900 to 1250 μg, 900 to 1500 μg, 900 to 1750 μg, 900 to 2000 μg, 900 to 2250 μg, 900 to 2500 μg, 900 to 2750 μg, 900 to 3000 μg, 1000 to 1250 μg, 1000 to 1500 μg, 1000 to 1750 μg, 1000 to 2000 μg, 1000 to 2250 μg, 1000 to 2500 μg, 1000 to 2750 μg, 1000 to 3000 μg, 2 to 500 μg, 50 to 500 μg, 3 to 100 μg, 5 to 20 μg, 5 to 100 μg, 10 μg, 20 μg, 30 μg, 40 μg, 50 μg, 60 μg, 70 μg, 75 μg, 80 μg, 90 μg, 100 μg, 150 μg, 200 μg, 250 μg, 300 μg, 350 μg, 400 μg, 450 μg, 500 μg, 550 μg, 600 μg, 650 μg, 700 μg, 750 μg, 800 μg, 850 μg, 900 μg, 950 μg, 1000 μg, 1050 μg, 1100 μg, 1150 μg, 1200 μg, 1250 μg, 1300 μg, 1350 μg, 1400 μg, 1450 μg, 1500 μg, 1550 μg, 1600 μg, 1650 μg, 1700 μg, 1750 μg, 1800 μg, 1850 μg, 1900 μg, 1950 μg, 2000 μg, 2050 μg, 2100 μg, 2150 μg, 2200 μg, 2250 μg, 2300 μg, 2350 μg, 2400 μg, 2450 μg, 2500 μg, 2550 μg, 2600 μg, 2650 μg, 2700 μg, 2750 μg, 2800 μg, 2850 μg, 2900 μg, 2950 μg, 3000 μg, 3250 μg, 3500 μg, 3750 μg, 4000 μg, 4250 μg, 4500 μg, 4750 μg, 5000 μg of a peptide or agonist described herein and from 1 μg to 500 μg (e.g. 1 μg, 5 μg, 10 μg, 50 μg, 75 μg, 100 μg, 125 μg, 150 μg, 175 μg, 200 μg, 225 μg, 250 μg, 275 μg, 300 μg, 325 μg, 350 μg, 375 μg, 400 μg, 425 μg, 450 μg, 475 μg, 500 μg) of Levsin® (hyoscyamine sulfate).

[0346] A dosage unit (e.g. an oral dosage unit) can include, for example, from 1 to 30 μg, 1 to 40 μg, 1 to 50 μg, 1, to 100 μg, 1 to 200 μg, 1 to 300 μg, 1 to 400 μg, 1 to 500 μg, 1 to 600 μg, 1 to 700 μg, 1 to 800 μg, 1 to 900 μg, 1 to 1000 μg, 10 to 30 μg, 10 to 40 μg, 10 to 50 μg, 10 to 100 μg, 10 to 200 μg, 10 to 300 μg, 10 to 400 μg, 10 to 500 μg, 10 to 600 μg, 10 to 700 μg, 10 to 800 μg, 10 to 900 μg, 10 to 1000 μg, 100 to 200 μg, 100 to 300 μg, 100 to 400 μg, 100 to 500 μg, 100 to 600 μg, 100 to 700 μg, 100 to 800 μg, 100 to 900 μg, 100 to 1000 μg, 100 to 1250 μg, 100 to 1500 μg, 100 to 1750 μg, 100 to 2000 μg, 100 to 2250 μg, 100 to 2500 μg, 100 to 2750 μg, 100 to 3000 μg, 200 to 300 μg, 200 to 400 μg, 200 to 500 μg, 200 to 600 μg, 200 to 700 μg, 200 to 800 μg, 200 to 900 μg, 200 to 1000 μg, 200 to 1250 μg, 200 to 1500 μg, 200 to 1750 μg, 200 to 2000 μg, 200 to 2250 μg, 200 to 2500 μg, 200 to 2750 μg, 200 to 3000 μg, 300 to 400 μg, 300 to 500 μg, 300 to 600 μg, 300 to 700 μg, 300 to 800 μg, 300 to 900 μg, 300 to 1000 μg, 300 to 1250 μg, 300 to 1500 μg, 300 to 1750 μg, 300 to 2000 μg, 300 to 2250 μg, 300 to 2500 μg, 300 to 2750 μg, 300 to 3000 μg, 400 to 500 μg, 400 to 600 μg, 400 to 700 μg, 400 to 800 μg, 400 to 900 μg, 400 to 1000 μg, 400 to 1250 μg, 400 to 1500 μg, 400 to 1750 μg, 400 to 2000 μg, 400 to 2250 μg, 400 to 2500 μg, 400 to 2750 μg, 400 to 3000 μg, 500 to 600 μg, 500 to 700 μg, 500 to 800,g, 500 to 900 μg, 500 to 1000 μg, 500 to 1250 μg, 500 to 1500 μg, 500 to 1750 μg, 500 to 2000 μg, 500 to 2250 μg, 500 to 2500 μg, 500 to 2750 μg, 500 to 3000 μg, 600 to 700 μg, 600 to 800 μg, 600 to 900 μg, 600 to 1000 μg, 600 to 1250 μg, 600 to 1500 μg, 600 to 1750 μg, 600 to 2000 μg, 600 to 2250 μg, 600 to 2500 μg, 600 to 2750 μg, 600 to 3000 μg, 700 to 800 μg, 700 to 900 μg, 700 to 1000 μg, 700 to 1250 μg, 700 to 1500 μg, 700 to 1750 μg, 700 to 2000 μg, 700 to 2250 μg, 700 to 2500 μg, 700 to 2750 μg, 700 to 3000 μg, 800 to 900 μg, 800 to 1000 μg, 800 to 1250 μg, 800 to 1500 μg, 800 to 1750 μg, 800 to 2000 μg, 800 to 2250 μg, 800 to 2500 μg, 800 to 2750 μg, 800 to 3000 μg, 900 to 1000 μg, 900 to 1250 μg, 900 to 1500 μg, 900 to 1750 μg, 900 to 2000 μg, 900 to 2250 μg, 900 to 2500 μg, 900 to 2750 μg, 900 to 3000 μg, 1000 to 1250 μg, 1000 to 1500 μg, 1000 to 1750 μg, 1000 to 2000 μg, 1000 to 2250 μg, 1000 to 2500 μg, 1000 to 2750 μg, 1000 to 3000 μg, 2 to 500 μg, 50 to 500 μg, 3 to 100 μg, 5 to 20 μg, 5 to 100 μg. 10 μg, 20 μg, 30 μg, 40 μg, 50 μg, 60 μg, 70 μg, 75 μg, 80 μg, 90 μg, 100 μg, 150 μg, 200 μg, 250 μg, 300 kg, 350 μg, 400 μg, 450 μg, 500 μg, 550 μg, 600 μg, 650 μg, 700 μg, 750 μg, 800 μg, 850 μg, 900 μg, 950 μg, 1000 μg, 1050 μg, 1100 μg, 1150 μg, 1200 μg, 1250 μg, 1300 μg, 1350 μg, 1400 μg, 1450 μg, 1500 μg, 1550 μg, 1600 μg, 1650 μg, 1700 μg, 1750 μg, 1800 μg, 1850 μg, 1900 μg, 1950 μg, 2000 μg, 2050 μg, 2100 μg, 2150 μg, 2200 μg, 2250 μg, 2300 μg, 2350 μg, 2400 μg, 2450 μg, 2500 μg, 2550 μg, 2600 μg, 2650 μg, 2700 μg, 2750 μg, 2800 μg, 2850 μg, 2900 μg, 2950 μg, 3000 μg, 3250 μg, 3500 μg, 3750 μg, 4000 μg, 4250 μg, 4500 μg, 4750 μg, 5000 μg of a peptide or agonist described herein and from 50 mg to 500 mg (e.g. 50 mg, 60 mg, 70 mg, 80 mg, 90 mg, 100 mg, 125 mg, 150 mg, 175 mg, 200 mg, 225 mg, 250 mg, 275 mg, 300 mg, 325 mg, 350 mg, 375 mg, 400 mg, 425 mg, 450 mg, 500 mg) of Dicetel® (pinaverium bromide).

[0347] A dosage unit (e.g. an oral dosage unit) can include; for example, from 1 to 30 μg, 1 to 40 μg, 1 to 50 μg, 1 to 100 μg, 1 to 200 μg, 1 to 300 μg, 1 to 400 μg, 1 to 500 μg, 1 to 600 μg, 1 to 700 μg, 1 to 800 μg, 1 to 900 μg, 1 to 1000 μg, 10 to 30 μg, 10 to 40 μg, 10 to 50 μg, 10 to 100 μg, 10 to 200 μg, 10 to 300 μg, 10 to 400 μg, 10 to 500 μg, 10 to 600 μg, 10 to 700 μg, 10 to 800 μg, 10 to 900 μg, 10 to 1000 μg, 100 to 200 μg, 100 to 300 μg, 100 to 400 μg, 100 to 500 μg, 100 to 600 μg, 100 to 700 μg, 100 to 800 μg, 100 to 900 μg, 100 to 1000 μg, 100 to 1250 μg, 100 to 1500 μg, 100 to 1750 μg, 100 to 2000 μg, 100 to 2250 μg, 100 to 2500 μg, 100 to 2750 μg, 100 to 3000 μg, 200 to 300 μg, 200 to 400 μg, 200 to 500 μg, 200 to 600 μg, 200 to 700 μg, 200 to 800 μg, 200 to 900 μg, 200 to 1000 μg, 200 to 1250 μg, 200 to 1500 μg, 200 to 1750 μg, 200 to 2000 μg, 200 to 2250 μg, 200 to 2500 μg, 200 to 2750 μg, 200 to 3000 μg, 300 to 400 μg, 300 to 500 μg, 300 to 600 μg, 300 to 700 μg, 300 to 800 μg, 300 to 900 μg, 300 to 1000 μg, 300 to 1250 μg, 300 to 1500 μg, 300 to 1750 μg, 300 to 2000 μg, 300 to 2250 μg, 300 to 2500 μg, 300 to 2750 μg, 300 to 3000 μg, 400 to 500 μg, 400 to 600 μg, 400 to 700 μg, 400 to 800 μg, 400 to 900 μg, 400 to 1000 μg, 400 to 1250 μg, 400 to 1500 μg, 400 to 1750 μg, 400 to 2000 μg, 400 to 2250 μg, 400 to 2500 μg, 400 to 2750 μg, 400 to 3000 μg, 500 to 600 μg, 500 to 700 μg, 500 to 800 μg, 500 to 900 μg, 500 to 1000 μg, 500 to 1250 μg, 500 to 1500 μg, is 500 to 1750 μg, 500 to 2000 μg, 500 to 2250 μg, 500 to 2500 μg, 500 to 2750 μg, 500 to 3000 μg, 600 to 700 μg, 600 to 800 μg, 600 to 900 μg, 600 to 1000 μg, 600 to 1250 μg, 600 to 1500 μg, 600 to 1750 μg, 600 to 2000 μg, 600 to 2250 μg, 600 to 2500 μg, 600 to 2750 μg, 600 to 3000 μg, 700 to 800 μg, 700 to 900 μg, 700 to 1000 μg, 700 to 1250 μg, 700 to 1500 μg, 700 to 1750 μg, 700 to 2000 μg, 700 to 2250 μg, 700 to 2500 μg, 700 to 2750 μg, 700 to 3000 μg, 800 to 900 μg, 800 to 1000 μg, 800 to 1250 μg, 800 to 1500 μg, 800 to 1750 μg, 800 to 2000 μg, 800 to 2250 μg, 800 to 2500 μg, 800 to 2750 μg, 800 to 3000 μg, 900 to 1000 μg, 900 to 1250 μg, 900 to 1500 μg, 900 to 1750 μg, 900 to 2000 μg, 900 to 2250 μg, 900 to 2500 μg, 900 to 2750 μg, 900 to 3000 μg, 1000 to 1250 μg, 1000 to 1500 μg, 1000 to 1750 μg, 1000 to 2000 μg, 1000 to 2250 μg, 1000 to 2500 μg, 1000 to 2750 μg, 1000 to 3060 μg, 2 to 500 μg, 50 to 500 μg, 3 to 100 μg, 5 to 20 μg, 5 to 100 μg, 10 μg, 20 μg, 30 μg, 40 μg, 50 μg, 60 μg, 70 μg, 75 μg, 80 μg, 90 μg, 100 μg, 150 μg, 200 μg, 250 μg, 300 μg, 350 μg, 400 μg, 450 μg, 500 μg, 550 μg, 600 μg, 650 μg, 700 μg, 750 μg, 800 μg, 850 μg, 900 μg, 950 μg, 1000 μg, 1050 μg, 1 100 μg, 1150 μg, 1200 μg, 1250 μg, 1300 μg, 1350 μg, 1400 μg, 1450 μg, 1500 μg, 1550 μg, 1600 μg, 1650 μg, 1700 μg, 1750 μg, 1800 μg, 1850 μg, 1900 μg, 1950 μg, 2000 μg, 2050 μg, 2100 μg, 2150 μg, 2200 μg, 2250 μg, 2350 μg, 2400 μg, 2450 μg, 2500 μg, 2550 μg, 2600 μg, 2650 μg, 2700 μg, 2750 μg, 2800 μg, 2850 μg, 2900 μg, 2950 μg, 3000 μg, 3250 μg, 3500 μg, 3750 μg, 4000 μg, 4250 μg, 4500 μg, 4750 μg, 5000 μg, of a peptide or agonist described herein and from 50 mg to 500 mg (e.g. 50 mg, 75 mg, 100 mg, 125 mg, 135 mg, 150 mg, 175 mg, 200 mg, 225 mg, 250 mg, 275 mg, 300 mg, 325 mg, 350 mg, 375 mg, 400 mg, 425 mg, 450 mg, 475 mg, 500 mg) of mebeverine (DUSPATAL®, DUSPATALIN®, COLOFAC MR®, COLOTAL®).

[0348] A dosage unit (e.g. an oral dosage unit) can include, for example, from 1 to 30 μg, 1 to 40 μg, 1 to 50 μg, 1 to 100 μg, 1 to 200 μg, 1 to 300 μg, 1 to 400 μg, 1 to 500 μg, 1 to 600 μg, 1 to 700 μg, 1 to 800 μg, 1 to 900 μg, 1 to 1000 μg, 10 to 30 μg, 10 to 40 μg, 10 to 50 μg, 10 to 100 μg, 10 to 200 μg, 10 to 300 μg, 10 to 400 μg, 10 to 500 μg, 10 to 600 μg, 10 to 700 μg, 10 to 800 μg, 10 to 900 μg, 10 to 1000 μg, 100 to 200 μg, 100 to 300 μg, 100 to 400 μg, 100 to 500 μg, 100 to 600 μg, 100 to 700 μg, 100 to 800 μg, 100 to 900 μg, 100 to 1000 μg, 100 to 1250 μg, 100 to 1500 μg, 100 to 1750 μg, 100 to 2000 μg, 100 to 2250 μg, 100 to 2500 μg, 100 to 2750 μg, 100 to 3000 μg, 200 to 300 μg, 200 to 400 μg, 200 to 500 μg, 200 to 600 μg, 200 to 700 μg, 200 to 800 μg, 200 to 900 μg, 200 to 1000 μg, 200 to 1250 μg, 200 to 1500 μg, 200 to 1750 μg, 200 to 2000 μg, 200 to 2250 μg, 200 to 2500 μg, 200 to 2750 μg, 200 to 3000 μg, 300 to 400 μg, 300 to 500 μg, 300 to 600 μg, 300 to 700 μg, 300 to 800 μg, 300 to 900 μg, 300 to 1000 μg, 300 to 1250 μg, 300 to 1500 μg, 300 to 1750 μg, 300 to 2000 μg, 300 to 2250 μg, 300 to 2500 μg, 300 to 2750 μg, 300 to 3000 μg, 400 to 500 μg, 400 to 600 μg, 400 to 700 μg, 400 to 800 μg, 400 to 900 μg, 400 to 1000 μg, 400 to 1250 μg, 400 to 1500 μg, 400 to 1750 μg, 400 to 2000 μg, 400 to 2250 μg, 400 to 2500 μg, 400 to 2750 μg, 400 to 3000 μg, 500 to 600 μg, 500 to 700 μg, 500 to 800 μg, 500 to 900 μg, 500 to 1000 μg, 500 to 1250 μg, 500 to 1500 μg, 500 to 1750 μg, 500 to 2000 μg, 500 to 2250 μg, 500 to 2500 μg, 500 to 2750 μg, 500 to 3000 μg, 600 to 700 μg, 600 to 800 μg, 600 to 900 μg, 600 to 1000 μg, 600 to 1250 μg, 600 to 1500 μg, 600 to 1750 μg, 600 to 2000 μg, 600 to 2250 μg, 600 to 2500 μg, 600 to 2750 μg, 600 to 3000 μg, 700 to 800 μg, 700 to 900 μg, 700 to 1000 μg, 700 to 1250 μg, 700 to 1500 μg, 700 to 1750 μg, 700 to 2000 μg, 700 to 2250 μg, 700 to 2500 μg, 700 to 2750 μg, 700 to 3000 μg, 800 to 900 μg, 800 to 1000 μg, 800 to 1250 μg, 800 to 1500 μg, 800 to 1750 μg, 800 to 2000 μg, 800 to 2250 μg, 800 to 2500 μg, 800 to 2750 μg, 800 to 3000 μg, 900 to 1000 μg, 900 to 1250 μg, 900 to 1500 μg, 900 to 1750 μg, 900 to 2000 μg, 900 to 2250 μg, 900 to 2500 μg, 900 to 2750 μg, 900 to 3000 μg, 1000 to 1250 μg, 1000 to 1500 μg, 1000 to 1750 μg, 1000 to 2000 μg, 1000 to 2250 μg, 1000 to 2500 μg, 1000 to 2750 μg, 1000 to 3000 μg, 2 to 500 μg, 50 to 500 μg, 3 to 100 μg, 5 to 20 μg, 5 to 1100g, 10 μg, 20 μg, 30 μg, 40 μg, 50 μg, 60 μg, 70 μg, 75 μg, 80 μg, 90 μg, 100 μg, 150 μg, 200 μg, 250 μg, 300 μg, 350 μg, 400 μg, 450 μg, 500 μg, 550 μg, 600 μg, 650 μg, 700 μg, 750 μg, 800 μg, 850 μg, 900 μg, 950 μg, 1000 μg, 1050 μg, 1100 μg, 1150 μg, 1200 μg, 1250 μg, 1300 μg, 1350 μg, 1400 μg, 1450 μg, 1500 μg, 1550 μg, 1600 μg, 1650 μg, 1700 μg, 1750 μg, 1800 μg, 1850 μg, 1900 μg, 1950 μg, 2000 μg, 2050 μg, 2100 μg, 2150 μg, 2200 μg, 2250 μg, 2300 μg, 2350 μg, 2400 μg, 2450 μg, 2500 μg, 2550 μg, 2600 μg, 2650 μg, 2700 μg, 2750 μg, 2850 μg, 2900 μg, 2950 μg, 3000 μg, 3250 μg, 3500 μg, 3750 μg, 4000 μg, 4250 μg, 4500 μg, 4750 μg, 5000 μg of a peptide or agonist described herein and from 1 mg to 120 mg (e.g. 1 mg, 2.5 mg, 5 mg, 7.5 mg, 10 mg, 12.5 mg, 15 mg, 20 mg, 25 mg, 30 mg, 40 mg, 50 mg, 60 mg, 70 mg, 80 mg, 90 mg, 100 mg, 110 mg, 120 mg) of Propanthiline bromide (Pro-Banthine®).

[0349] A dosage unit (e.g. an oral dosage unit) can include, for example, from 1 to 30 μg, 1 to 40 μg, 1 to 50 μg, 1 to 100 μg, 1 to 200 μg, 1 to 300 μg, 1 to 400 μg, 1 to 500 μg, 1 to 600 μg, 1 to 700 μg, 1 to 800 μg, 1 to 900 μg, 1 to 1000 μg, 10 to 30 μg, 10 to 40 μg, 10 to 50 μg, 10 to 100 μg, 10 to 200 μg, 10 to 300 μg, 10 to 400 μg, 10 to 500 μg, 10 to 600 μg, 10 to 700 μg, 10 to 800 μg, 10 to 900 μg, 10 to 1000 μg, 100 to 200 μg, 100 to 300 μg, 100 to 400 μg, 100 to 500 μg, 100 to 600 μg, 100 to 700 μg, 100 to 800 μg, 100 to 900 μg, 100 to 1000 μg, 100 to 1250 μg, 100 to 1500 μg, 100 to 1750 μg, 100 to 2000 μg, 100 to 2250 μg, 100 to 2500 μg, 100 to 2750 μg, 100 to 3000 μg, 200 to 300 μg, 200 to 400 μg, 200 to 500 μg, 200 to 600 μg, 200 to 700 μg, 200 to 800 μg, 200 to 900 μg, 200 to 1000 μg, 200 to 1250 μg, 200 to 1500 μg, 200 to 1750 μg, 200 to 2000 μg, 200 to 2250 μg, 200 to 2500g, 200 to 2750 μg, 200 to 3000 μg, 300 to 400 μg, 300 to 500 μg, 300 to 600 μg, 300 to 700 μg, 300 to 800 μg, 300 to 900 μg, 300 to 1000 μg, 300 to 1250 μg, 300 to 1500 μg, 300 to 1750 μg, 300 to 2000 μg, 300 to 2250 μg, 300 to 2500 μg, 300 to 2750 μg, 300 to 3000 μg, 400 to 500 μg, 400 to 600 μg, 400 to 700 μg, 400 to 800 μg, 400 to 900 μg, 400 to 1000 μg, 400 to 1250 μg, 400 to 1500 μg, 400 to 1750 μg, 400 to 2000 μg, 400 to 2250 μg, 400 to 2500 μg, 400 to 2750 μg, 400 to 3000 μg, 500 to 600 μg, 500 to 700 μg, 500 to 800 μg, 500 to 900 μg, 500 to 1000 μg, 500 to 1250 μg, 500 to 1500 μg, 500 to 1750 μg, 500 to 2000 μg, 500 to 2250 μg, 500 to 2500 μg, 500 to 2750 μg, 500 to 3000 μg, 600 to 700 μg, 600 to 800 μg, 600 to 900 μg, 600 to 1000 μg, 600 to 1250 μg, 600 to 1500 μg, 600 to 1750 μg, 600 to 2000 μg, 600 to 2250 μg, 600 to 2500 μg, 600 to 2750 μg, 600 to 3000 μg, 700 to 800 μg, 700 to 900 μg, 700 to 1000 μg, 700 to 1250 μg, 700 to 1500 μg, 700 to 1750 μg, 700 to 2000 μg, 700 to 2250 μg, 700 to 2500 μg, 700 to 2750 μg, 700 to 3000 μg, 800 to 900 μg, 800 to 1000 μg, 800 to 1250 μg, 800 to 1500 μg, 800 to 1750 μg, 800 to 2000 μg, 800 to 2250 μg, 800 to 2500 μg, 800 to 2750 μg, 800 to 3000 μg, 900 to 1000 μg, 900 to 1250 μg, 900 to 1500 μg, 900 to 1750 μg, 900 to 2000 μg, 900 to 2250 μg, 900 to 2500 μg, 900 to 2750 μg, 900 to 3000 μg, 1000 to 1250 μg, 1000 to 1500 μg, 1000 to 1750 μg, 1000 to 2000 μg, 1000 to 2250 μg, 1000 to 2500 μg, 1000 to 2750 μg, 000 to 3000g, 2 to 500 μg, 50 to 500 μg, 3 to 100 μg, 5 to 20 μg, 5 to 100 μg, 10 μg, 20g, 30 μg, 40 μg, 50 μg, 60 μg, 70 μg, 75 μg, 80 μg, 90 μg, 100 μg, 150 μg, 200 μg, 250 μg, 300 μg, 350 μg, 400 μg, 450 μg, 500 μg, 550 μg, 600 μg, 650 μg, 700 μg, 750 μg, 800 μg, 850 μg, 900 μg, 950 μg, 1000 μg, 1050 μg, 1100 μg, 1150 μg, 1200 μg, 1250 μg, 1300 μg, 1350 μg, 1400 μg, 1450 μg, 1500 μg, 1550 μg, 1600 μg, 1650 μg, 1700 μg, 1750 μg, 1800 μg, 1850 μg, 1900 μg, 1950 μg, 2000 μg, 2050 μg, 2100 μg, 2150 μg, 2200 μg, 2250 μg, 2300 μg, 2350 μg, 2400 μg, 2450 μg, 2500 μg, 2550 μg, 2600 μg, 2650 μg, 2700 μg, 2750 μg, 2800 μg, 2850 μg, 2900 μg, 2950 μg, 3000 μg, 3250 μg, 3500 μg, 3750 μg, 4000 μg, 4250 μg, 4500 μg, 4750 μg, 5000 μg of a peptide or agonist described herein and from 100 μg to 5000 μg (e.g. 100 μg, 200 μg, 300 μg, 400 μg, 500 μg, 600 μg, 700 μg, 800 μg, 900 μg, 1000 μg, 1250 μg, 1500 μg, 1750 μg, 2000 μg, 2250 μg, 2500 μg, 2750 μg, 3000 μg, 3500 μg, 4000 μg, 4500 μg, 5000 μg) of Granisetron (Kytril®).

[0350] A dosage unit (e.g. an oral dosage unit) can include, for example, from 1 to 30 μg, 1 to 40 μg, 1 to 50 μg, 1 to 100 μg, 1 to 200 μg, 1 to 300 μg, 1 to 400 μg, 1 to 500 μg, 1 to 600 μg, 1 to 700 μg, 1 to 800 μg, 1 to 900 μg, 1 to 1000 μg, 10 to 30g, 10 to 40 μg, 10 to 50 μg, 10 to 10 μg, 10 to 200 μg, 10 to 300 μg, 0 to 400 μg, 10 to 500 μg, 10 to 600 μg, 10 to 700 μg, 10 to 800 μg, 10 to 900 μg, 10 to 1000 μg, 100 to 200 μg, 100 to 300 μg, 100 to 400 μg, 100 to 500 μg, 100 to 600 μg, 100 to 700 μg, 100 to 800 μg, 100 to 900 μg, 100 to 1000 μg, 100 to 1250 μg, 100 to 1500 μg, 100 to 1750g, 100 to 2000 μg, 100 to 2250 μg, 100 to 2500 μg, 100 to 2750 μg, 100 to 3000 μg, 200 to 300 μg, 200 to 400 μg, 200 to 500 μg, 2004 to 600 μg, 200 to 700 μg, 200 to 800g, 200 to 900 μg, 200 to 1000 μg, 200 to 1250 μg, 200 to 1500 μg, 200 to 1750 μg, 200 to 2000 μg, 200 to 2250 μg, 200 to 2500 μg, 200 to 2750 μg, 200 to 3000 μg, 300 to 400 μg, 300 to 500 μg, 300 to 600 μg, 300 to 700 μg, 300 to 800 μg, 300 to 900 μg, 300 to 1000 μg, 300 to 1250 μg, 300 to 1500 μg, 300 to 1750 μg, 300 to 2000 μg, 300 to 2250 μg, 300 to 2500 μg, 300 to 2750 μg, 300 to 3000 μg, 400 to 500 μg, 400 to 600 μg, 400 to 700 μg, 400 to 800 μg, 400 to 900 age 400 to 1000 μg, 400 to 1250 μg, 400 to 1500 μg, 400 to 1750 μg, 400 to 2000 μg, 400 to 2250 μg, 400 to 2500 μg, 400 to 2750 μg, 400 to 3000 μg, 500 to 600 μg, 500 to 700 μg, 500 to 800 μg, 500 to 900 μg, 500 to 1000 μg, 500 to 1250 μg, 500 to 1500 μg, 500 to 1750 μg, 500 to 2000 μg, 500 to 2250 μg, 500 to 2500 μg, 500 to 2750 μg, 500 to 3000 μg, 600 to 700 μg, 600 to 800 μg, 600 to 900 μg, 600 to 1000 μg, 600 to 1250 μg, 600 to 1500 μg, 600 to 1750 μg, 600 to 2000 μg, 600 to 2250 μg, 600 to 2500 μg, 600 to 2750 μg, 600 to 3000 μg, 700 to 800 μg, 700 to 900 μg, 700 to 1000 μg, 700 to 1250 μg, 700 to 1500 μg, 700 to 1750 μg, 700 to 2000 μg, 700 to 2250 μg, 700 to 2500 μg, 700 to 2750 μg, 700 to 3000 μg, 800 to 900 μg, 800 to 1000 μg, 800 to 1250 μg, 800 to 1500 μg, 800 to 1750 μg, 800 to 2000 μg, 800 to 2250 μg, 800 to 2500 μg, 800 to 2750 μg, 800 to 3000 μg, 900 to 1000 μg, 900 to 1250 μg, 900 to 1500 μg, 900 to 1750 μg, 900 to 2000 μg, 900 to 2250 μg, 900 to 2500 μg, 900 to 2750 μg, 900 to 3000 μg, 1000 to 1250 μg, 1000 to 1500 μg, 1000 to 1750 μg, 1000 to 2000 μg, 1000 to 2250 μg, 1000 to 2500 μg, 1000 to 2750 μg, 1000 to 3000 μg, 2 to 500 μg, 50 to 500 μg, 3 to 100 μg, 5 to 20 μg, 5 to 100 μg, 10 μg, 20 μg, 30 μg, 40 μg, 50 μg, 60 μg, 70 μg, 75 μg, 80 μg, 90 μg, 100 μg, 150 μg, 200 μg, 250 μg, 300 μg, 350 μg, 400 μg, 450 μg, 500 μg, 550 μg, 600 μg, 650 μg, 700 μg, 750 μg, 800 μg, 850 μg, 900 μg, 950 μg, 1000 μg, 1050 μg, 1100 μg, 1150 μg, 1200 μg, 1250 μg, 1300 μg, 1350 μg, 1400 μg, 1450 μg, 1500 μg, 1550 μg, 1600 μg, 1650 μg, 1700 μg, 1750 μg, 1800 μg, 1850 μg, 1900 μg, 1950 μg, 2000 μg, 2050 μg, 2100 μg, 2150 μg, 2200 μg, 2250 μg, 2300 μg, 2350 μg, 2400 μg, 2450 μg, 2500 μg, 2550 μg, 2600 μg, 2650 μg, 2700 μg, 2750 μg, 2800 μg, 2850 μg, 2900 μg, 2950 μg, 3000 μg, 3250 μg, 3500 μg, 3750 μg, 4000 μg, 4250 μg, 4500 μg, 4750 μg, 5000 μg of a peptide or agonist described herein and from 50 μg to 3000 μg (e.g. 50 μg, 100 μg, 200 μg, 300 μg, 400 μg, 500 μg, 600 μg, 700 μg, 800 μg, 900 μg, 1000 μg, 1250 μg, 1500 μg, 1750 μg, 2000 μg, 2250 μg, 2500 μg, 2750 μg, 3000 μg) of Lotronex® (alosetron hydrochloride).

[0351] A dosage unit (e.g. an oral dosage unit) can include, for example, from 1 to 30 μg, 1 to 40 μg, 1 to 50 μg, 1 to 100 μg, 1 to 200 μg, 1 to 300 μg, 1 to 400 μg, 1 to 500 μg, 1 to 600 μg, 1 to 700 μg, 1 to 800 μg, 1 to 900 μg, 1 to 1000 μg, 10 to 30 μg, 10 to 40 μg, 10 to 50 μg, 10 to 1100 μg, 10 to 200 μg, 10 to 300 μg, 10 to 400 μg, 10 to 500 μg, 10 to 600 μg, 10 to 700 μg, 10 to 800 μg, 10 to 900 μg, 10 to 1000 μg, 100 to 200 μg, 100 to 300 μg, 100 to 400 μg, 100 to 500 μg, 100 to 600 μg, 100 to 700 μg, 100 to 800 μg, 100 to 900 μg, 100 to 1000 μg, 100 to 1250 μg, 100 to 1500 μg, 100 to 1750 μg, 100 to 2000 μg, 100 to 2250 μg, 100 to 2500 μg, 100 to 2750 μg, 100 to 3000 μg, 200 to 300 μg, 200 to 400 μg, 200 to 500 μg, 200 to 600 μg, 200 to 700 μg, 200 to 800 μg, 200 to 900 μg, 200 to 1000 μg, 200 to 1250 μg, 200 to 1500 μg, 200 to 1750 μg, 200 to 2000 μg, 200 to 2250 μg, 200 to 2500 μg, 200 to 2750 μg, 200 to 3000 μg, 300 to 400 μg, 300 to 500 μg, 300 to 600 μg, 300 to 700 μg, 300 to 800 μg, 300 to 900 μg, 300 to 1000 μg, 300 to 1250 μg, 300 to 1500 μg, 300 to 1750 μg, 300 to 2000 μg, 300 to 2250 μg, 300 to 2500 μg, 300 to 2750 μg, 300 to 3000 μg, 400 to 500 μg, 400 to 600 μg, 400 to 700 μg, 400 to 800 μg, 400 to 900 μg, 400 to 1000 μg, 400 to 1250 μg, 400 to 1500 μg, 400 to 1750 μg, 400 to 2000 μg, 400 to 2250 μg, 400 to 2500 μg, 400 to 2750 μg, 400 to 3000 μg, 500 to 600 μg, 500 to 700 μg, 500 to 800 μg, 500 to 900 μg, 500 to 1000 μg, 500 to 1250 μg, 500 to 1500 μg, 500 to 1750 μg, 500 to 2000 μg, 500 to 2250 μg, 500 to 2500 μg, 500 to 2750 μg, 500 to 3000 μg, 600 to 700 μg, 600 to 800 μg, 600 to 900 μg, 600 to 1000 μg, 600 to 1250 μg, 600 to 1500 μg, 600 to 1750 μg, 600 to 2000 μg, 600 to 2250 μg, 600 to 2500 μg, 600 to 2750 μg, 600 to 3000 μg, 700 to 800 μg, 700 to 900 μg, 700 to 1000 μg, 700 to 1250 μg, 700 to 1500 μg, 700 to 1750 μg, 700 to 2000 μg, 700 to 2250 μg, 700 to 2500 μg, 700 to 2750 μg, 700 to 3000 μg, 800 to 900 μg, 800 to 1000 μg, 800 to 1250 μg, 800 to 1500 μg, 800 to 1750 μg, 800 to 2000 μg, 800 to 2250 μg, 800 to 2500 μg, 800 to 2750 μg, 800 to 3000 μg, 900 to 1000 μg, 900 to 1250 μg, 900 to 1500 μg, 900 to 1750 μg, 900 to 2000 μg, 900 to 2250 μg, 900 to 2500 μg, 900 to 2750 μg, 900 to 3000 μg, 1000 to 1250 μg, 1000 to 1500 μg, 1000 to 1750 μg, 1000 to 2000 μg, 1000 to 2250 μg, 1000 to 2500 μg, 1000 to 2750 μg, 1000 to 3000 μg, 2 to 500 μg, 50 to 500 μg, 3 to 100 μg, 5 to 20 μg, 5 to 100 μg, 10 μg, 20 μg, 30 μg, 40 μg, 50 μg, 60 μg, 70 μg, 75 μg, 80 μg, 90 μg, 100 μg, 150 μg, 200 μg, 250 μg, 300 μg, 350 μg, 400 μg, 450 μg, 500 μg, 550 μg, 600 μg, 650 μg, 700 μg, 750 μg, 800 μg, 850 μg, 900 μg, 950 μg, 1000 μg, 1050 μg, 1100 μg, 1150 μg, 1200 μg, 1250 μg, 1300 μg, 1350 μg, 1400 μg, 1450 μg, 1500 μg, 1550 μg, 1600 μg, 1650 μg, 1700 μg, 1750 μg, 1800 μg, 1850 μg, 1900 μg, 1950 μg, 2000 μg, 2050 μg, 2100 μg, 2150 μg, 2200 μg, 2250 μg, 2300 μg, 2350 μg, 2400 μg, 2450 μg, 2500 μg, 2550 μg, 2600 μg, 2650 μg, 2700 μg, 2750 μg, 2800 μg, 2850 μg, 2900 μg, 2950 μg, 3000 μg, 3250 μg, 3500 μg, 3750 μg, 4000 μg, 4250 μg, 4500 μg, 4750 μg, 5000 μg of a peptide or agonist described herein and from 10 mg to 600 mg (e.g. 10 mg, 20 mg, 30 mg, 40 mg, 50 mg, 60 mg, 70 mg, 80 mg, 90 mg, 100 mg, 125 mg, 150 mg, 175 mg, 200 mg, 250 mg, 300 mg, 350 mg, 400 mg, 450 mg, 500 mg, 550 mg, 600 mg) of Xifaxan® (rifaximin).

[0352] A dosage unit (e.g. an oral dosage unit) can include, for example, from 1 to 30 μg, 1 to 40 μg, 1 to 50 μg, 1 to 100 μg, 1 to 200 μg, 1 to 300 μg, 1 to 400 μg, 1 to 500 μg, 1 to 600 μg, 1 to 700 μg, 1 to 800 μg, 1 to 900 μg, 1 to 1000 μg, 10 to 30, 10 to 40 μg, 10 to 50 μg, 10 to 100 μg, 10 to 200 μg, 10 to 300 μg, 10 to 400 μg, 10 to 500 μg, 10 to 600 μg, 10 to 700 μg, 10 to 800 μg, 10 to 900 μg, 10 to 1000 μg, 100 to 200 μg, 100 to 300 μg, 100 to 400 μg, 100 to 500 μg, 100 to 600 μg, 100 to 700 μg, 100 to 800 μg, 100 to 900 μg, 100 to 1000 μg, 100 to 1250 μg, 100 to 1500 μg, 100 to 1750 μg, 100 to 2000 μg, 100 to 2250 μg, 100 to 2500 μg, 100 to 2750 μg, 100 to 3000 μg, 200 to 300 μg, 200 to 400 μg, 200 to 500 μg, 200 to 600 μg, 200 to 700 μg, 200 to 800 μg, 200 to 900 μg, 200 to 1000 μg, 200 to 1250 μg, 200 to 1500 μg, 200 to 1750 μg, 200 to 2000 μg, 200 to 2250 μg, 200 to 2500 μg, 200 to 2750 μg, 200 to 3000 μg, 300 to 400 μg, 300 to 500 μg, 300 to 600 μg, 300 to 700 μg, 300 to 800 μg, 300 to 900 μg, 300 to 1000 μg, 300 to 1250 μg, 300 to 1500 μg, 300 to 1750 μg, 300 to 2000 μg, 300 to 2250 μg, 300 to 2500 μg, 300 to 2750 μg, 300 to 3000 μg, 400 to 500 μg, 400 to 600 μg, 400 to 700 μg, 400 to 800 μg, 400 to 900 μg, 400 to 1000 μg, 400 to 1250 μg, 400 to 1500 μg, 400 to 1750 μg, 400 to 2000 μg, 400 to 2250 μg, 400 to 2500 μg, 400 to 2750 μg, 400 to 3000 μg, 500 to 600 μg, 500 to 700 μg, 500 to 800 μg, 500 to 900 μg, 500 to 1000 μg, 500 to 1250 μg, 500 to 1500 μg, 500 to 1750 μg, 500 to 2000 μg, 500 to 2250 μg, 500 to 2500 μg, 500 to 2750 μg, 500 to 3000 μg, 600 to 700 μg, 600 to 800 μg, 600 to 900 μg, 600 to 1000 μg, 600 to 1250 μg, 600 to 1500 μg, 600 to 1750 μg, 600 to 2000 μg, 600 to 2250 μg, 600 to 2500 μg, 600 to 2750 μg, 600 to 3000 μg, 700 to 800 μg, 700 to 900 μg, 700 to 1000 μg, 700 to 1250 μg, 700 to 1500 μg, 700 to 1750 μg, 700 to 2000 μg, 700 to 2250 μg, 700 to 2500 μg, 700 to 2750 μg, 700 to 3000 μg, 800 to 900 μg, 800 to 1000 μg, 800 to 1250 μg, 800 to 1500 μg, 800 to 1750 μg, 800 to 2000 μg, 800 to 2250 μg, 800 to 2500 μg, 800 to 2750 μg, 800 to 3000 μg, 900 to 1000 μg, 900 to 1250 μg, 900 to 1500 μg, 900 to 1750 μg, 900 to 2000 μg, 900 to 2250 μg, 900 to 2500 μg, 900 to 2750 μg, 900 to 3000 μg, 1000 to 1250 μg, 1000 to 1500 μg, 1000 to 1750 μg, 1000 to 2000 μg, 1000 to 2250 μg, 1000 to 2500 μg, 11000 to 2750 μg, 1000 to 3000 μg, 2 to 500 μg, 50 to 500 μg, 3 to 100 μg, 5 to 20 μg, 5 to 100 μg, 10 μg, 20 μg, 30 μg, 40 μg, 50 μg, 60 μg, 70 μg, 75 μg, 80 μg, 90 μg, 100 μg, 150 μg, 200 μg, 250 μg, 300 μg, 350 μg, 400 μg, 450 μg, 500 μg, 550 μg, 600 μg, 650 μg, 700 μg, 750 μg, 800 μg, 850 μg, 900 μg, 950 μg, 1000 μg, 1050 μg, 1100 μg, 1150 μg, 1200 μg, 1250 μg, 1300 μg, 1350 μg, 1400 μg, 1450 μg, 1500 μg, 1550 μg, 1600 μg, 1650 μg, 1700 μg, 1750 μg, 1800 μg, 1850 μg, 1900 μg, 1950 μg, 2000 μg, 2050 μg, 2100 μg, 2150 μg, 2200 μg, 2250 μg, 2300 μg, 2350 μg, 2400 μg, 2450 μg, 2500 μg, 2550 μg, 2600 μg, 2650 μg, 2700 μg, 2750 μg, 2800 μg, 2850 μg, 2900 μg, 2950 μg, 3000 μg, 3250 μg, 3500 μg, 3750 μg, 4000 μg, 4250 μg, 4500 μg, 4750 μg, 5000 μg of a polypeptide or agonist described herein and from 10 mg to 600 mg (e.g. 10 mg, 20 mg, 30 mg, 40 mg, 50 mg, 60 mg, 70 mg, 80 mg, 90 mg, 100 mg, 120 mg, 140 mg, 160 mg, 180 mg, 200 mg, 220 mg, 240 mg, 260 mg, 280 mg, 300 mg, 320 mg, 340 mg, 360 mg, 380 mg, 400 mg, 420 mg, 440 mg, 460 mg, 480 mg, 500 mg, 520 mg, 540 mg, 560 mg, 580 mg, 600 mg) of furosemide (Lasix).

[0353] A dosage unit (e.g. an oral, intravenous or intramuscular dosage unit) can include, for example, from 1 to 30 μg, 1 to 40 μg, 1 to 50 μg, 1 to 100 μg, 1 to 200 μg, 1 to 300 μg, 1 to 400 μg, 1 to 500 μg, 1 to 600 μg, 1 to 700 μg, 1 to 800 μg, 1 to 900 μg, 1 to 1000 μg, 10 to 30 μg, 10 to 40 μg, 10 to 50 μg, 10 to 100 μg, 10 to 200 μg, 10 to 300 μg, 10 to 400 μg, 10 to 500 μg, 10 to 600 μg, 10 to 700 μg, 10 to 800 μg, 10 to 900 μg, 10 to 1000 μg, 100 to 200 μg, 100 to 300 μg, 100 to 400 μg, 100 to 500 μg, 100 to 600 μg, 100 to 700 μg, 100 to 800 μg, 100 to 900 μg, 100 to 1 1000 μg, 100 to 1250 μg, 100 to 1500 μg, 100 to 1750 μg, 100 to 2000 μg, 100 to 2250 μg, 100 to 2500 μg, 100 to 2750 μg, 100 to 3000 μg, 200 to 300 μg, 200 to 400 μg, 200 to 500 μg, 200 to 600 μg, 200 to 700 μg, 200 to 800 μg, 200 to 900 μg, 200 to 1000 μg, 200 to 1250 μg, 200 to 1500 μg, 200 to 1750 μg, 200 to 2000 μg, 200 to 2250 μg, 200 to 2500 μg, 200 to 2750 μg, 200 to 3000 μg, 300 to 400 μg, 300 to 500 μg, 300 to 600 μg, 300 to 700 μg, 300 to 800 μg, 300 to 900 μg, 300 to 1000 μg, 300 to 1250 μg, 300 to 1500 μg, 300 to 1750 μg, 300 to 2000 μg, 300 to 2250 μg, 300 to 2500 μg, 300 to 2750 μg, 300 to 3000 μg, 400 to 500 μg, 400 to 600 μg, 400 to 700 μg, 400 to 800 μg, 400 to 900 μg, 400 to 1000 μg, 400 to 1250 μg, 400 to 1500 μg, 400 to 1750 μg, 400 to 2000 μg, 400 to 2250 μg, 400 to 2500 μg, 400 to 2750 μg, 400 to 3000 μg, 500 to 600 μg, 500 to 700 μg, 500 to 800 μg, 500 to 900 μg, 500 to 1000 μg, 500 to 1250 μg, 500 to 1500 μg, 500 to 1750 μg, 500 to 2000 μg, 500 to 2250 μg, 500 to 2500 μg, 500 to 2750 μg, 500 to 3000 μg, 600 to 700 μg, 600 to 800 μg, 600 to 900 μg, 600 to 1000 μg, 600 to 1250 μg, 600 to 1500 μg, 600 to 1750 μg, 600 to 2000 μg, 600 to 2250 μg, 600 to 2500 μg, 600 to 2750 μg, 600 to 3000 μg, 700 to 800 μg, 700 to 900 μg, 700 to 1000 μg, 700 to 1250 μg, 700 to 1500 μg, 700 to 1750 μg, 700 to 2000 μg, 700 to 2250 μg, 700 to 2500 μg, 700 to 2750 μg, 700 to 3000 μg, 800 to 900 μg, 800 to 1000 μg, 800 to 1250 μg, 800 to 1500 μg, 800 to 1750 μg, 800 to 2000 μg, 800 to 2250 μg, 800 to 2500 μg, 800 to 2750 μg, 800 to 3000 μg, 900 to 1000 μg, 900 to 1250 μg, 900 to 1500 μg, 900 to 1750 μg, 900 to 2000 μg, 900 to 2250 μg, 900 to 2500 μg, 900 to 2750 μg, 900 to 3000 μg, 1000 to 1250 μg, 1000 to 1500 μg, 1000 to 1750 μg, 1000 to 2000 μg, 1000 to 2250 μg, 1000 to 2500 μg, 1000 to 2750 μg, 1000 to 3000 μg, 2 to 500 μg, 50 to 500 μg, 3 to 100 μg, 5 to 20 μg, 5 to 100 μg, 10 μg, 20 μg, 30 μg, 40 μg, 50 μg, 60 μg, 70 μg, 75 μg, 80 μg, 90 μg, 100 μg, 150 μg, 200 μg, 250 μg, 300 μg, 350 μg, 400 μg, 450 μg, 500 μg, 550 μg, 600 μg, 650 μg, 700 μg, 750 μg, 800 μg, 850 μg, 900 μg, 950 μg, 1000 μg, 1050 μg, 1100 μg, 150 μg, 1200 μg, 1250 μg, 1300 μg, 1350 μg, 1400 μg, 1450 μg, 1500 μg, 1550 μg, 1600 μg, 1650 μg, 1700 μg, 1750 μg, 1800 μg, 1850 μg, 1900 μg, 1950 μg, 2000 μg, 2050 μg, 2100 μg, 2150 μg, 2200 μg, 2250 μg, 2300 μg, 2350 μg, 2400 μg, 2450 μg, 2500 μg, 2550 μg, 2600 μg, 2650 μg, 2700 μg, 2750 μg, 2800 μg, 2850 μg, 2900 μg, 2950 μg, 3000 μg, 3250 μg, 3500 μg, 3750 μg, 4000 μg, 4250 μg, 4500 μg, 4750 μg, 5000 μg of a polypeptide or agonist described herein and from 0.2 mg to 10 mg (e.g. 0.2 mg, 0.4 mg, 0.5 mg, 0.75 mg, 1 mg, 1.5 mg, 2 mg, 2.5 mg, 3 mg, 3.5 mg, 4 mg, 4.5 mg, 5 mg, 5.5 mg, 6 mg, 6.5 mg, 7 mg, 7.5 mg, 8 mg, 8.5 mg, 9 mg, 9.5 mg, 10 mg) of bumetanide (Bumex®).

[0354] The precise amount of each of the two or more active ingredients in a dosage unit will depend on the desired dosage of each component. Thus, it can be useful to create a dosage unit that will, when administered according to a particular dosage schedule (e.g., a dosage schedule specifying a certain number of units and a particular timing for administration), deliver the same dosage of each component as would be administered if the patient was being treated with only a single component. In other circumstances, it might be desirable to create a dosage unit that will deliver a dosage of one or more components that is less than that which would be administered if the patient was being treated only with a single component. Finally, it might be desirable to create a dosage unit that will deliver a dosage of one or more components that is greater than that which would be administered if the patient was being treated only with a single component. The pharmaceutical composition can include additional ingredients including but not limited to the excipients described herein. In certain embodiments, one or more therapeutic agents of the dosage unit may exist in an extended or control release formulation and additional therapeutic agents may not exist in extended release formulation. For example, a peptide or agonist described herein may exist in a controlled release formulation or extended release formulation in the same dosage unit with another agent that may or may not be in either a controlled release or extended release formulation. Thus, in certain embodiments, it may be desirable to provide for the immediate release of one or more of the agents described herein, and the controlled release of one or more other agents.

[0355] In certain embodiments the dosage unit and daily dose are equivalent. In certain embodiments the dosage unit and the daily dose are not equivalent. In various embodiments, the dosage unit is administered twenty minutes prior to food consumption, twenty minutes after food consumption, with food at anytime of the day, without food at anytime of the day, with food after an overnight fast (e.g. with breakfast), at bedtime after a low fat snack. In various embodiments, the dosage unit is administered once a day, twice a day, three times a day, four times a day, five times a day, six times a day.

[0356] When two or more active ingredients are combined in single dosage form, chemical interactions between the active ingredients may occur. For example, acidic and basic active ingredients can react with each other and acidic active ingredients can facilitate the degradation of acid labile substances. Thus, in certain dosage forms, acidic and basic substances can be physically separated as two distinct or isolated layers in a compressed tablet, or in the core and shell of a press-coated tablet. Additional agents that are compatible with acidic as well as basic substances, have the flexibility of being placed in either layer. In certain multiple layer compositions at least one active ingredient can be enteric-coated. In certain embodiments thereof at least one active ingredient can be presented in a controlled release form. In certain embodiments where a combination of three or more active substances are used, they can be presented as physically isolated segments of a compressed mutlilayer tablet, which can be optionally film coated.

[0357] The therapeutic combinations described herein can be formulated as a tablet or capsule comprising a plurality of beads, granules, or pellets. All active ingredients including the vitamins of the combination are formulated into granules or beads or pellets that are further coated with a protective coat, an enteric coat, or a film coat to avoid the possible chemical interactions. Granulation and coating of granules or beads is done using techniques well known to a person skilled in the art. At least one active ingredient can present in a controlled release form. Finally these coated granules or beads are filled into hard gelatin capsules or compressed to form tablets.

[0358] The therapeutic combinations described herein can be formulated as a capsule comprising microtablets or minitablets of all active ingredients. Microtablets of the individual agents can be prepared using well known pharmaceutical procedures of tablet making like direct compression, dry granulation or wet granulation. Individual microtablets can be filled into hard gelatin capsules. A final dosage form may comprise one or more microtablets of each individual component. The microtablets may be film coated or enteric coated.

[0359] The therapeutic combinations described herein can be formulated as a capsule comprising one or more microtablets and powder, or one or more microtablets and granules or beads. In order to avoid interactions between drugs, some active ingredients of a said combination can be formulated as microtablets and the others filled into capsules as a powder, granules, or beads. The microtablets may be film coated or enteric coated. At least one active ingredient can be presented in controlled release form.

[0360] The therapeutic combinations described herein can be formulated wherein the active ingredients are distributed in the inner and outer phase of tablets. In an attempt to divide chemically incompatible components of proposed combination, few interacting components are converted in granules or beads using well known pharmaceutical procedures in prior art. The prepared granules or beads (inner phase) are then mixed with outer phase comprising the remaining active ingredients and at least one pharmaceutically acceptable excipient. The mixture thus comprising inner and outer phase is compressed into tablets or molded into tablets. The granules or beads can be controlled release or immediate release beads or granules, and can further be coated using an enteric polymer in an aqueous or non-aqueous system, using methods and materials that are known in the art.

[0361] The therapeutic combinations described herein can be formulated as single dosage unit comprising suitable buffering agent. All powdered ingredients of said combination are mixed and a suitable quantity of one or more buffering agents is added to the blend to minimize possible interactions.

[0362] The agents described herein, alone or in combination, can be combined with any pharmaceutically acceptable carrier or medium. Thus, they can be combined with materials that do not produce an adverse, allergic or otherwise unwanted reaction when administered to a patient. The carriers or mediums used can include solvents, dispersants, coatings, absorption promoting agents, controlled release agents, and one or more inert excipients (which include starches, polyols, granulating agents, microcrystalline cellulose, diluents, lubricants, binders, disintegrating agents, and the like), etc. If desired, tablet dosages of the disclosed compositions may be coated by standard aqueous or nonaqueous techniques.

### Analgesic Agents in Combitherapy

[0363] The peptides and agonists described herein can be used in combination therapy with an analgesic agent, e.g., an analgesic compound or an analgesic peptide. These peptides and compounds can be administered with the peptides described herein (simultaneously or sequentially). They can also be optionally covalently linked or attached to an agent described herein to create therapeutic conjugates. Among the useful analgesic agents are: Ca channel blockers, 5HT receptor antagonists (for example 5HT3, 5HT4 and 5HT1 receptor antagonists), opioid receptor agonists (loperamide, fedotozine, and fentanyl), NK1 receptor antagonists, CCK receptor agonists (e.g., loxiglunide), NK1 receptor antagonists, NK3 receptor antagonists, norepinephrine-serotonin reuptake inhibitors (NSRI), vanilloid and cannabanoid receptor agonists, and sialorphin. Analgesics agents in the various classes are described in the literature.

[0364] Among the useful analgesic peptides are sialorphin-related peptides, including those comprising the amino acid sequence QHNPR (SEQ ID NO: ), including: VQHNPR (SEQ ID NO: ); VRQHNPR (SEQ ID NO: ); VRGQHNPR (SEQ ID NO: ); VRGPQHNPR (SEQ ID NO: ); VRGPRQHNPR (SEQ ID NO: ); VRGPRRQHNPR (SEQ ID NO: ); and RQHNPR (SEQ ID NO: ). Sialorphin-related peptides bind to neprilysin and inhibit neprilysin-mediated breakdown of substance P and Met-enkephalin. Thus, compounds or peptides that are inhibitors of neprilysin are useful analgesic agents which can be admninistered with the peptides described herein in a co-therapy or linked to the peptides described herein, e.g., by a covalent bond. Sialophin and related peptides are described in U.S. Pat. No. 6,589,750; U.S. 20030078200 A1; and WO 02/051435 A2.

[0365] Opioid receptor antagonists and agonists can be administered with the peptides described herein in co-therapy or linked to the agent described herein, e.g., by a covalent bond. For example, opioid receptor antagonists such as naloxone, naltrexone, methyl nalozone, nalmefene, cypridime, beta funaltrexamine, naloxonazine, naltrindole, and norbinaltorphimine are thought to be useful in the treatment of IBS. It can be useful to formulate opioid antagonists of this type is a delayed and sustained release formulation such that initial release of the antagonist is in the mid to distal small intestine and/or ascending colon. Such antagonists are described in WO 01/32180 A2. Enkephalin pentapeptide (HOE825; Tyr-D-Lys-Gly-Pbe-L-homoserine) is an agonist of the mu and delta opioid receptors and is thought to be useful for increasing intestinal motility (Eur. J. Pharm. 219:445, 1992), and this peptide can be used in conjunction with the peptides described herein. Also useful is trimebutine which is thought to bind to mu/delta/kappa opioid receptors and activate release of motilin and modulate the release of gastrin, vasoactive intestinal peptide, gastrin and glucagons. Kappa opioid receptor agonists such as fedotozine, asimadoline, and ketocyclazocine, and compounds described in WO 03/097051 and WO05/007626 can be used with or linked to the peptides described herein. In addition, mu opioid receptor agonists such as morphine, diphenyloxylate, frakefamide (H-Tyr-D-Ala-Phe(F)-Phe-NH₂; WO 01/019849 A1) and loperamide can be used.

[0366] Tyr-Arg (kyotorphin) is a dipeptide that acts by stimulating the release of met-enkephalins to elicit an analgesic effect (J. Biol. Chem 262:8165, 1987). Kyotorplin can be used with or linked to the peptides described herein.

[0367] Chromogranin-derived peptide (CgA 47-66; see, e.g., Ghia et al. 2004 Regulatory Peptides 119:199) can be used with or linked to the peptides described herein.

[0368] CCK receptor agonists such as caerulein from amphibians and other species are useful analgesic agents that can be used with or linked to the peptides described herein.

[0369] Conotoxin peptides represent a large class of analgesic peptides that act at voltage gated Ca channels, NMDA receptors or nicotinic receptors. These peptides can be used with or linked to the peptides described herein.

[0370] Peptide analogs of thymulin (FR Application 2830451) can have analgesic activity and can be used with or linked to the peptides described herein.

[0371] CCK (CCKa or CCKb) receptor antagonists, including loxiglumide and dexloxiglumide (the R-isomer of loxiglumide) (WO 88/05774) can have analgesic activity and can be used with or linked to the peptides described herein.

[0372] Other useful analgesic agents include 5-HT4 agonists such as tegaserod (Zelnorm®), mosapride, metoclopramide, zacopride, cisapride, renzapride, benzimidazolone derivatives such as BLMU 1 and BIMU 8, and lirexapride. Such agonists are described in: EP1321142 A1, WO 03/053432A1, EP-505322 A1, EP 505322 B1, U.S. Pat. No. 5,510,353, EP 507672 A1, EP 507672 B1, and U.S. Pat. No. 5,273,983.

[0373] Calcium channel blockers such as ziconotide and related compounds described in, for example, EP625162B1, U.S. Pat. No. 5,364,842, U.S. Pat. No. 5,587,454, U.S. Pat. No. 5,824,645, U.S. Pat. No. 5,859,186, U.S. Pat. No. 5,994,305, U.S. Pat. No. 6,087,091, U.S. Pat. No. 6,136,786, WO 93/13128 A1, EP 1336409 A1, EP 835126 A1, EP 835126 B1, U.S. Pat. No. 5,795,864, U.S. Pat. No. 5,891,849, U.S. Pat. No. 6,054,429, WO 97/01351 A1, can be used with or linked to the peptides described herein.

[0374] Various antagonists of the NK-1, NK-2, and NK-3 receptors (for a review see Giardina et al. 2003 Drugs 6:758) can be can be used with or linked to the peptides described herein.

[0375] NK1 receptor antagonists such as: aprepitant (Merck & Co Inc), vofopitant, ezlopitant (Pfizer, Inc.), R-673 (Hoffmann-La Roche Ltd), SR-48968 (Sanofi Synthelabo), CP-122,721 (Pfizer, Inc.), GW679769 (Glaxo Smith Kl(ine), TAK-637 (Takeda/Abbot), SR-14033, and related compounds described in, for example, EP 873753 A1, US 20010006972 A1, US 20030109417 A1, WO 01/52844 A1, can be used with or linked to the peptides described herein.

[0376] NK-2 receptor antagonists such as nepadutant (Menarini Ricerche SpA), saredutant (Sanofi-Synthelabo), GW597599 (Glaxo Smith Kline), SR-144190 (Sanofi-Synthelabo) and UK-290795 (Pfizer Inc) can be used with or linked to the peptides described herein.

[0377] NK3 receptor antagonists such as osanetant (SR-142801; Sanofi-Synthelabo), SSR-241586, talnetant and related compounds described in, for example, WO 02/094187 A2, EP 876347 A1, WO 97/21680 A1, U.S. Pat. No. 6,277,862, WO 98/11090, WO 95/28418, WO 97/19927, and Boden et al. (J Med Chem. 39:1664-75, 1996) can be used with or linked to the peptides described herein.

[0378] Norepinephrine-serotonin reuptake inhibitors (NSR1) such as milnacipran and related compounds described in WO 03/077897 A1 can be used with or linked to the peptides described herein.

[0379] Vanilloid receptor antagonists such as arvanil and related corpouds described in WO 01/64212 A1 can be used with or linked to the peptides described herein.

[0380] The analgesic peptides and compounds can be administered with the peptides and agonists described herein (simultaneously or sequentially). The analgesic agents can also be covalently linked to the peptides and agonists described herein to create therapeutic conjugates. Where the analgesic is a peptide and is covalently linked to an agent described herein the resulting peptide may also include at least one trypsin cleavage site. When present within the peptide, the analgesic peptide may be preceded by (if it is at the carboxy terminus) or followed by (if it is at the amino terminus) a trypsin cleavage site that allows release of the analgesic peptide.

[0381] In addition to sialorphin-related peptides, analgesic peptides include: AspPhe, endomorphin-1, endomnorphin-2, nocistatin, dalargin, lupron, ziconotide, and substance P.

### Diabetes, Obesity and Other Disorders

[0382] Pharmaceutical compositions comprising at least two of: 1) an agent that stimulates the production of cAMP (e.g., glucagon-like peptide 1 (GLP-1)); 2) an agent that inhibits the degradation of a cyclic nucleotide (e.g., a phosphodiesterase inhibitor); and 3) a peptide or agonist described herein useful for treating diabetes and obesity. Such compositions may also be useful for treating secondary hyperglycemias in connection with pancreatic diseases (chronic pancreatitis, pancreasectomy, hemochromatosis) or endocrine diseases (acromegaly, Cushing's syndrome, pheochromocytoma or hyperthyreosis), drug-induced hyperglycemias (benzothiadiazine saluretics, diazoxide or glucocorticoids), pathologic glucose tolerance, hyperglycemias, dyslipoproteinemias, adiposity, hyperlipoproteinemias and/or hypotensions.

[0383] The phosphodiesterase inhibitor can be specific for a particular phosphodiesterase (e.g., Group III or Group IV) or a non-specific phosphodiesterase inhibitor, such as papaverine, theophylline, enprofyllines and/or IBM. Specific phosphodiesterase inhibitors which inhibit group III phosphodiesterases (cGMP-inhibited phosphodiesterases), including indolidane (LY195115), cilostamide (OPC 3689), lixazinone (RS 82856), Y-590, imazodane (CI914), SKF 94120, quazinone, ICI 153,110, cilostazole, bemorandane (RWJ 22867), siguazodane (SK&F 94-836), adibendane (BM 14,478), milrinone (WIN 47203), enoximone (MDL 17043), pimobendane (IJD-CG 115), MCI-154, saterinone (BDF 8634), sulmazole (ARL 115), UD-CG 212, motapizone, piroximone, and ICI 118233 can be useful. In addition, phosphodiesterase inhibitors which inhibit group IV phosphodiesterases (cAMP-specific phosphodiesterases), such as rolipram ZK 62711; pyrrolidone), imidazolidinone (RO 20-1724), etazolate (SQ 65442), denbufylline (BRL 30892), ICI63197, and RP73401 can be used.

### Other Agents for Use in Combitherapy

[0384] Also within the invention are pharmaceutical compositions comprising a peptide or agonists described herein and a second therapeutic agent. The second therapeutic agent can be administered to treat any condition for which it is useful, including conditions that are not considered to be the primary indication for treatment with the second therapeutic agent. The second therapeutic agent can be administered simultaneously or sequentially. The second therapeutic agent can be covalently linked to the peptides and agonists described herein to create a therapeutic conjugate. When the second therapeutic agent is another peptide, a linker including those described herein may be used between the peptide described herein and the second therapeutic peptide.

[0385] Examples of additional therapeutic agents to treat gastrointestinal and other disorders include:

agents to treat constipation (e.g., a chloride channel activator such as the bicylic fatty acid, Lubiprostone (formerly known as SPI-0211; Sucamnpo Pharmaceuticals, Inc.; Bethesda, Md.), a laxative (eg. a bulk-forming laxative (e.g. nonstarch polysaccharides, Colonel Tablet (polycarbophil calcium), Plantago Ovata®, Equalactin® (Calcium Polycarbophil)), fiber (e.g. FIBERCON® (Calcium Polycarbophil), an osmotic laxative, a stimulant laxative (such as diphenylmethanes (e.g. bisacodyl), anthraquinones (e.g. cascara, senna), and surfactant laxatives (e.g. castor oil, docusates), an emollient/lubricating agent (such as mineral oil, glycerine, and docusates), MiraLax (Braintree Laboratories, Braintree Mass.), dexloxiglumnide (Forest Laboratories, also known as CR 2017 Rottapharm (Rotta Research Laboratorium SpA)), saline laxatives, enemas, suppositories, and CR 3700 (Rottapharm (Rotta Research Laboratorium SpA);
acid reducing agents such as proton pump inhibitors (e.g., omeprazole (Prilosec®), esomeprazole (Nexium®), lansoprazole (Prevacid®), pantoprazole (Protonix®) and rabeprazole (Aciphex®)) and Histamine H2-receptor antagonist (also known as H2 receptor blockers including cimetidine, ranitidine, famotidine and nizatidine);
prokinetic agents including itopride, octreotide, bethanechol, metoclopramide (Reglan®), domperidone (Motilium®), erythromycin (and derivatives thereof) or cisapride (propulsid®);
prokineticin polypeptides hornologs, variants and chimeras thereof including those described in U.S. Pat. No. 7,052,674 which can be used with or linked to the polypeptides described herein;
pro-motility agents such as the vasostatin-derived peptide, chromogranin A (4-16) (see, e.g., Ghia et al. 2004 Regulatory Peptides 121:31) ormotilin agonists (e.g., GM-611 or mitemcinal fumarate) or nociceptin/Orphanin FQ receptor modulators (US20050169917);
other peptides which can bind to and/or activate GC-C including those described in US20050287067;
complete or partial 5HT (e.g. 5HT1, 5HT2, 5HT3, 5HT4) receptor agonists or antagonists (including 5HT1A antagonists (e.g. AGI-001 (AGI therapeutics), 5HT2B antagonists (e.g. PGN1091 and PGN1164 (Pharmagene Laboratories Limited), and 5HT4 receptor agonists (such as tegaserod (ZELNORM®), prucalopride, mosapride, metoclopramide, zacopride, cisapride, renzapride, benzimidazolone derivatives such as BIMU 1 and BIMU 8, and lirexapride). Such agonists/modulatos are described in: EP1321142 A1, WO 03/053432A1, EP 505322 A1, EP 505322 B1, U.S. Pat. No. 5,510,353, EP 507672 A1, EP 507672 B1, U.S. Pat. No. 5,273,983, and U.S. Pat. No. 6,951,867); 5HT3 receptor agonists such as MKC-733; and 5HT3 receptor antagonists such as DDP-225 (MCI-225; Dynogen Pharmaceuticals, Inc.), cilansetron (Calmactin®), alosetron (Lotronex®), Ondansetron HCl (Zofran®), Dolasetron (ANZEMET®), palonosetron (Aloxi®), Granisetron (Kytril®), YM060(ramosetron; Astellas Pharma Inc.; ramosetron may be given as a daily dose of 0.002 to 0.02 mg as described in EP01588707) and ATI-7000 (Aryx Therapeutics, Santa Clara Calif.);
muscarinic receptor agonists;
anti-inflammatory agents;
antispasmodics including but not limited to anticholinergic drugs (like dicyclomine (e.g. Colimex®, Formulex®, Lomine®, Protylol®, Viscerol®, Spasmoban®, Bentyl®, Bentylol®), hyoseyainine (e.g. IB-Stat®, Nulev®, Levsin®, Levbid®, Levsinex Timecaps®, Levsin/SL®, Anaspaz®, A-Spas S/L®, Cystospaz®, Cystospaz-M®, Dojuiamar®, Colidrops Liquid Pediatric®, Gastrosed®, Hyco Elixir®, Hyosol®, Hyospaz®, Hyosyne®, Losamine®, Medispaz®, Neosol®, Spacol®, Spasdel®, Symax®, Symax SL®), Donnatal (e.g. Donnatal Extentabs®), clidinium (e.g. Quarzan, in combination with Librium=Librax), methantheline (e.g. Bantlune), Mepenzolate (e.g. Cantil), homatropine (e.g. hycodan, Homapin), Propantheline bromide (e.g. Pro-Banthine), Glycopyrrolate (e.g. Robinul®, Robinul Forte®), scopolamine (e.g. Transderm-Scop®, Transderm-V®), hyosine-N-butylbromide (e.g. Buscopan®), Pirenzepine (e.g. Gastrozepin®) Propantheline Bromide (e.g. Propanthel®), dicycloverine (e.g. Merbentyl®), glycopyrronium bromide (e.g. Glycopyrrolate®), hyoscine hydrobromide, hyoscine methobromide, methanthelinium, and octatropine); peppermint oil; and direct smooth muscle relaxants like cimetropium bromide, mebeverine (DUSPATAL®, DUSPATALIN®), COLOFAC MR®, COLOTAL®), otilonium bromide (octilonium), pinaverium (e.g. Dicetel® (pinaverium bromide; Solvay S.A.)), Spasfon® (hydrated phloroglucinol and trimethylphloroglucinol)and trimebutine (including trimebutine maleate (Modulon®);
antidepressants, including but not limited to those listed herein, as well as tricyclic antidepressants like amitriptyline (Elavil®), desipramine (Norpramin®), imipramine (Tofrianil®), amoxapine (Asendin®), nortriptyline; the selective serotonin reuptake inhibitors (SSRI's) like paroxetine (Paxil®), fluoxetine (Prozac®), sertraline (Zoloft®), and citralopram (Celexa®); and others like doxepin (Sinequan®) and trazodone (Desyrel®);
centrally-acting analgesic agents such as opioid receptor agonists, opioid receptor antagonists (e.g., naltrexone);
agents for the treatment of Inflammatory bowel disease;
agents for the treatment of Crohn's disease and/or ulcerative colitis (e.g., alequel (Enzo Biochem, Inc.; Farmingsale, N.Y.), the anti-inflanmmatory peptide RDP58 (Genzyme, Inc.; Cambridge, Mass.), and TRAFICET-EN™ (ChemoCentryx, Inc.; San Carlos, Calif.);
agents that treat gastrointestinal or visceral pain;
agents that increase cGMP levels (as described in US20040121994) like adrenergic receptor antagonists, dopamine receptor agonists and PDE (phosphodiesterase) inhibitors including but not limited to those disclosed herein;
purgatives that draw fluids to the intestine (e.g., VISICOL®, a combination of sodium phosphate monobasic monohydrate and sodium phosphate dibasic anhydrate);
Corticotropin Releasing Factor (CRF) receptor antagonists (including NBI-34041 (Neurocrine Biosciences, San Diego, Calif.), CRH9-41, astressin, R121919 (Janssen Pharmaceutica), CP154,526, NBI-27914, Antalarmin, DMP696 (Bristol-Myers Squibb) CP-316,311 (Pfizer, Inc.), SB723620 (GSK), GW876008 (Neurocrine/Glaxo Smith Kline), ONO-2333Ms (Ono Pharmaceuticals), TS-041 (Janssen), AAG561 (Novartis) and those disclosed in U.S. Pat. No. 5,063,245, U.S. Pat. No. 5,861,398, US20040224964, US20040198726, US20040176400, US20040171607, US20040110815, US20040006066, and US20050209253);
glucagon-like peptides (glp-1) and analogues thereof (including exendin-4 and GTP-010 (Gastrotech Pharma A)) and inhibitors of DPP-IV (DPP-IV mediates the inactivation of glp-1);
tofisopam, enantiomerically-pure R-tofisopam, and pharmaceutically-acceptable salts thereof (US 20040229867);
tricyclic anti-depressants of the dibenzothiazepine type including but not limited to Dextofisopam® (Vela Pharmaceuticals), tianeptine (Stablon®) and other agents described in U.S. Pat. No. 6,683,072;
(E)-4 (1,3bis(cyclohexylmethyl)-1,2,34,-tetrahydro-2,6-diono-9H-purin-8-yl)cinnamric acid nonaethylene glycol methyl ether ester and related compounds described in WO 02/067942;
the probiotic PROBACTRIX® (The BioBalance Corporation; New York, N.Y.) which contains microorganisms useful in the treatment of gastrointestinal disorders;
antidiarrheal drugs including but not limited to loperamide (Imodium, Pepto Diarrhea), diphenoxylate with atropine (Lomotil, Lomocot), cholestyramine (Questran, Cholybar), atropine (Co-Phenotrope, Diarsed, Diphenoxylate, Lofene, Logen, Lonox, Vi-Atro, atropine sulfate injection) and Xifaxan® (rifaximin; Salix Pharmaceuticals Ltd), TZP-201 (Tranzyme Pharma Inc.), the neuronal acetylcholine receptor (nAChR) blocker AGI-004 (AGI therapeutics), and bismuth subsalicylate (Pepto-bismol);
anxiolytic drugs including but not limited toAtivan (lorazepam), alprazolam (Xanax®), chlordiazepoxide/clidinium (Librium®, Librax®), clonazepam (Klonopin®), clorazepate (Tranxene®), diazepam (Valium®), estazolam (ProSom®), flurazepam (Dalmane®), oxazepam (Serax®), prazepani (Centrax®), temazepam (Restoril®), triazolam (Halcion®;
Bedelix® (Montmorillonite beidellitic; Ipsen Ltd), Solvay SLV332 (ArQule Inc), YKP (SK Pharma), Asimadoline (Tioga Pharmaceuticals/Merck), AGI-003 (AGI Therapeutics);
neurokinin antagonists including those described in US20060040950;
potassium channel modulators including those described in U.S. Pat. No. 7,002,015;
the serotonin modulator AZD7371 (AstraZeneca Plc);
M3 muscarinic receptor antagonists such as darifenacin (Enablex; Novartis AG and zamifenacin (Pfizer);
herbal and natural therapies including but not limited to acidophilus, chamomile tea, evening primrose oil, fennel seeds,wormwood, comfrey, and compounds of Bao-Ji-Wan (magnolol, honokiol, imperatorin, and isoimperatorin) as in U.S. Pat. No. 6,923,992; and
compositions comprising lysine and an anti-stress agent for the treatment of irritable bowel syndrome as described in EP01550443.

[0386] The peptides and agonists described herein can be used in combination therapy with insulin and related compounds including primate, rodent, or rabbit insulin including biologically active variants thereof including allelic variants, more preferably human insulin available in recombinant form. Sources of human insulin include pharmaceutically acceptable and sterile formulations such as those available from Eli Lilly (Indianapolis, Ind. 46285) as Humulin™ (human insulin rDNA origin). See the THE PHYSICIAN'S DESK REFERENCE, 55.sup.th Ed. (2001) Medical Economics, Thomson Healthcare (disclosing other suitable human insulins). The peptides and agonists described herein can also be used in combination therapy with agents that can boost insulin effects or levels of a subject upon administration, e.g. glipizide and/or rosiglitazone. The peptides and agonists described herein can be used in combitherapy with SYMLIND (pramlintide acetate) and Exenatide® (synthetic exendin-4; a 39 aa peptide).

[0387] The peptides and agonists described herein can also be used in combination therapy with agents (e.g., Entereg™ (alvimopan; formerly called adolor/ ADL 8-2698), conivaptan and related agents describe in U.S. Pat. No. 6,645,959) used for the treatment of postoperative ileus and other disorders.

[0388] The peptides and agonists described herein can be used in combination therapy with an anti-hypertensive agent including but not limited to:

[0389] (1) diuretics, such as thiazides, including chlorthalidone, chlorthiazide, dichlorophenamide, hydroflumethiazide, indapamide, polythiazide, and hydrochlorothiazide; loop diuretics, such as bumetanide, ethacrynic acid, fuirosemide, and torsemide; potassium sparing agents, such as amiloride, and triamterene; carbonic anhydrase inhibitors, osmotics(such as glycerin) and aldosterone antagonists, such as spironolactone, epirenone, and the like; (2) beta-adrenergic blockers such as acebutolol, atenolol, betaxolol, bevantolol, bisoprolol, bopindolol, carteolol, carvedilol, celiprolol, esmolol, indenolol, metaprolol, nadolol, nebivolol, penbutolol, pindolol, propanolol, sotalol, tertatolol, tilisolol, and timolol, and the like;

[0390] (3) calcium channel blockers such as amlodipine, aranidipine, azelridipine, barnidipine, benidipine, bepridil, cinaldipine, clevidipine, diltiazem, efonidipine, felodipine, gallopamil, isradipine, lacidipine, lenildipine, lercanidipine, nicardipine, nifedipine, nilvadipine, niniodepine, nisoldipine, nitrendipine, manidipine, pranidipine, and verapamil, and the like;

[0391] (4) angiotensin converting enzyme (ACE) inhibitors such as benazepril; captopril; ceranapril; cilazapril; delapril; enalapril; enalopril; fosinopril; imidapril; lisinopril; losinopril; moexipril; quinapril; quinaprilat; ramipril; perindopril; perindropril; quanipril; spirapril; tenocapril; trandolapril, and zofenopril, and the like;

[0392] (5) neutral endopeptidase inhibitors such as omapatrilat, cadoxatril and ecadotril, fosidotril, sampatrilat, AVE7688, ER4030, and the like;

[0393] (6) endothelin antagonists such as tezosentan, A308165, and YM62899, and the like;

[0394] (7) vasodilators such as hydralazine, clonidine, minoxidil, and nicotinyl alcohol, and the like;

[0395] (8) angiotensin II receptor antagonists such as aprosartan, candesartan, eprosartan, irbesartan, losartan, olmesartan, pratosartan, tasosartan, telmisartan, valsartan, and EXP-3137, FI6828K, and RNH6270, and the like;

[0396] (9) α/β adrenergic blockers such as nipradilol, arotinolol and amosulalol, and the like;

[0397] (10) alpha 1 blockers, such as terazosin, urapidil, prazosin, tamsulosin, bunazosin, trimazosin, doxazosin, naftopidil, indoramin, WHP 164, and XEN010, and the like;

[0398] (11) alpha 2 agonists such as lofexidine, tiamenidine, moxonidine, rilmenidine and guanobenz, and the like;

[0399] (12) aldosterone inhibitors, and the like; and

[0400] (13) angiopoietin-2-binding agents such as those disclosed in WO03/030833.

[0401] Specific anti-hypertensive agents that can be used in combination with peptides and agonists described herein include, but are not limited to:

diuretics, such as thiazides (e.g., chlorthalidone, cyclothiazide (CAS RN 2259-96-3), chlorothiazide (CAS RN 72956-09-3, which may be prepared as disclosed in U.S. Pat. No. 2,809,194), dichlorophenamide, hydrofluinethiazide, indapamide, polythiazide, bendroflumethazide, methyclothazide, polythiazide, trichlorrnethazide, chlorthalidone, indapamide, metolazone, quinetbazone, althiazide (CAS RN 5588-16-9, which may be prepared as disclosed in British Patent No. 902,658), benzthiazide (CAS RN 91-33-8, which may be prepared as disclosed in U.S. Pat. No. 3,108,097), buthiazide (which may be prepared as disclosed in British Patent Nos. 861,367), and hydrochlorothiazide), loop diuretics (e.g. bumetanide, ethacrynic acid, furosemide, and torasemide), potassium sparing agents (e.g. amiloride, and triainterene (CAS Number 396-01-0)), and aldosterone antagonists (e.g. spironolactone (CAS Number 52-01-7), epirenone, and the like); O-adrenergic blockers such as Amiodarone (Cordarone, Pacerone), bunolol hydrochloride (CAS RN 31969-05-8, Parke-Davis), acebutolol (±N-[3-Acetyl-4-[2-hydroxy-3-[(1 methylethyl)amino]propoxy]phenyl]-butanamide, or (±)-3′-Acetyl-4′-[2-hydroxy-3-(isopropylamino) propoxy]butyranilide), acebutolol hydrochloride (e.g. Sectral®, Wyeth-Ayerst), alprenolol hydrochloride (CAS RN 13707-88-5 see Netherlands Patent Application No. 6,605,692), atenolol (e.g. Tenormin®, AstraZeneca), carteolol hydrochloride (e.g. Cartrol® Filmtab®, Abbott), Celiprolol hydrochloride (CAS RN 57470-78-7, also see in U.S. Pat. No. 4,034,009), cetamolol hydrochloride (CAS RN 77590-95-5, see also U.S. Pat. No. 4,059,622), labetalol hydrochloride (e.g. Normodyne®, Schering), esmolol hydrochloride (e.g. Brevibloc®, Baxter), levobetaxolol hydrochloride (e.g. Betaxon™ Ophthalmic Suspension, Alcon), levobunolol hydrochloride (e.g. Betagan® Liquifilm® with C CAP® Compliance Cap, Allergan), nadolol (e.g. Nadolol, Mylan), practolol (CAS RN 6673-35-4, see also U.S. Pat. No. 3,408,387), propranolol hydrochloride (CAS RN 318-98-9), sotalol hydrochloride (e.g. Betapace AF™, Berlex), timolol (2-Propanol, 1-[(1,1-dimethylethyl)amino]-3-[[4-4(4-morpholinyl)-1,2,5-thiadiazol-3-yl]oxy]-, hemihydrate, (S)-, CAS RN 91524-16-2), timolol maleate (S)-1-[(1,1-dimethylethyl) amino]-3-[[4-(4-morpholinyl)-1,2,5-thiadiazol-3- yl]oxy]-2-propanol (Z)-2-butenedioate (1:1) salt, CAS RN 26921-17-5), bisoprolol (2-Propanol, 1-[4-[[2-(1-methylethoxy)ethoxy]-methyl]phenoxyl]-3-[(1-meth- ylethyl)amino]-, (±), CAS RN 66722-44-9), bisoprolol fumarate (such as (±)-1-[4-[[2-(1-Methylethoxy)ethoxy]methyl]phenoxy]-3-[(1-methylethyl)amino]-2-propanol (E)-2-butenedioate (2:1) (salt), e.g., Zebeta™, Lederle Consumer), nebivalol (2H-1-Benzopyran-2-methanol, αα′-[iminobis(methylene)]bis[6-fluoro-3,4-dihydro-, CAS RN 99200-09-6 see also U.S. Pat. No. 4,654,362), cicloprolol hydrochloride, such 2-Propanol, 1-[4-[2-(cyclopropylmethoxy)ethoxy]phenoxy]-3-[1-methylethyl)amino]-, hydrochloride, A.A.S. RN 63686-79-3), dexpropranolol hydrochloride (2-Propanol, 1-[1-methylethy)-amino]-3-(1-naphthalenyloxy)-hydrochloride (CAS RN 13071-11-9), diacetolol hydrochloride (Acetamide, N-[3-acetyl-4-[2-hydroxy-3-[(1-methyl-ethyl)amino]propoxy][phenyl]-, monohydrochloride CAS RN 69796-04-9), dilevalol hydrochloride (Benzamide, 2-hydroxy-5-[1-hydroxy-2-[1-methyl-3-phenylpropyl)amino]ethyl]-, monohydrochloride, CAS RN 75659-08-4), exaprolol hydrochloride (2-Propanol, 1-(2-cyclohexylphenoxy)-3-[(1-methylethyl)amino]-, hydrochloride CAS RN 59333-90-3), flestolol sulfate (Benzoic acid, 2-fluoro-,3-[[2-[aminocarbonyl)amino]-1-dimethylethyl]amino]-2-hydroxypropyl ester, (±)- sulfate (1:1) (salt), CAS RN 88844-73-9; metalol hydrochloride (Methanesulfonamide, N-[4-[1-hydroxy-2-(methylamino)propyl]phenyl]-, monohydrochloride CAS RN 7701-65-7), metoprolol 2-Propanol, 1-[4-(2-methoxyethyl)phenoxy]-3-[1-methylethyl)amino]-; CAS RN 37350-58-6), metoprolol tartrate (such as 2-Propanol, 1-[4-(2-methoxyethyl)phenoxy]-3-[(1-methylethyl)amino]-, e.g., Lopressor®, Novartis), pamatolol sulfate (Carbamic acid, [2-[4-[2-hydroxy-3-[(1-methylethyl)aimino]propoxyl]phenyl]-ethyl]-, methyl ester, (±) sulfate (salt) (2:1), CAS RN 59954-01-7), penbutolol sulfate (2-Propanol, 1-(2-cyclopentylphenoxy)-3-[1,1-dimethyle-thyl)amino]1, (S)—, sulfate (2:1) (salt), CAS RN 38363-32-5), practolol (Acetamide, N-[4-[2-hydroxy-3-[(1-methylethyl)amino]-propoxy]phenyl]-, CAS RN 6673-35-4;) tiprenolol hydrochloride (Propanol, 1-[(1-methylethyl)amino]-3-[2-(methylthio)-phenoxy]-, hydrochloride, (±), CAS RN 39832-43-4), tolamolol (Benzamide, 4-[2-[[2-hydroxy-3-(2-methylphenoxy)-propyl]amino]ethoxyl]-, CAS RN 38103-61-6), bopindolol, indenolol, pindolol, propanolol, tertatolol, and tilisolol, and the like; calcium channel blockers such as besylate salt of amlodipine (such as 3-ethyl-5-methyl-2-(2-aminoethoxymethyl)-4-(2-chlorophenyl)-1,4-dihydro-6-methyl-3,5-pyridinedicarboxylate benzenesulphonate, e.g., Norvasc®, Pfizer), clentiazem maleate (1,5-Benzothiazepin-4(5H)-one, 3-(acetyloxy)-8-chloro-5-[2-(dimethylamino)ethyl]-2,3-dihydro-2-(4-methoxyphenyl)-(2S-cis)-, (Z)-2-butenedioate (1:1), see also U.S. Pat. No. 4,567,195), isradipine (3,5-Pyridinedicarboxylic acid, 4-(4-benzofurazanyl)-1,4-dihydro-2,6-dimethyl-, methyl 1-methylethyl ester, (±)-4(4-benzofurazanyl)-1,4-dihydro-2,6-dimethyl-3,5-pyridinedicarboxylate, see also U.S. Pat. No. 4,466,972); nimodipine (such as is isopropyl (2-methoxyethyl) 1,4- dihydro-2,6- dimethyl-4-(3-nitrophenyl)-3,5-pyridine- dicarboxylate, e.g. Nimotop®, Bayer), felodipine (such as ethyl methyl 4-(2,3-dichlorophenyl)-1,4-dihydro-2,6-dimethyl-3,5-pyridinedicarboxylate-, e.g. Plendil® Extended-Release, AstraZeneca LP), nilvadipine (3,5-Pyridinedicarboxylic acid, 2-cyano-1,4-dihydro-6-methyl-4-(3-nitrophenyl)-,3-methyl 5-(1-methylethyl) ester, also see U.S. Pat. No. 3,799,934), nifedipine (such as 3,5-pyridinedicarboxylic acid, 1,4-dihydro-2,6-dimethyl-4-(2-nitrophenyl)-, dimethyl ester, e.g., Procardia XL® Extended Release Tablets, Pfizer), diltiazem hydrochloride (such as 1,5-Benzothiazepin-4(5H)-one,3-(acetyloxy)-5-[2-(dimethylamino)ethyl]-2,-3-dihydro-2(4-methoxyphenyl)-, monohydrochloride, (+)-cis., e.g., Tiazac®, Forest), verapanil hydrochloride (such as benzeneacetronitrile, (alpha)-[[3-[[2-(3,4-dimethoxyphenyl)ethyl]methylamino]propyl]-3,4-dimethoxy-(alpha)-(1-methylethyl)hydrochloride, e.g., Isoptin® SR, Knoll Labs), teludipine hydrochloride (3,5-Pyridinedicarboxylic acid, 2-[(dimethylamino)methyl]4-[2-[(1E)-3-(1,1-dimethylethoxy)-3-oxo-1-propenyl]phenyl]-1,4-dihydro-6-methyl-, diethyl ester, monohydrochloride) CAS RN 108700-03-4), belfosdil (Phosphonic acid, [2-(2-phenoxyethyl)-1,3-propane-diyl]bis-, tetrabutyl ester CAS RN 103486-79-9), fostedil (Phosphonic acid, [[4-(2-benzothiazolyl)phenyl]methyl]-, diethyl ester CAS RN 75889-62-2), aranidipine, azelnidipine, barnidipine, benidipine, bepridil, cinaldipine, clevidipine, efonidipine, gallopamil, lacidipine, lemildipine, lercanidipine, monatepil maleate (1-piperazinebutanamide, N-(6,11-dihydrodibenzo(b,e)thiepin-11-yl)₄-(4-fluorophenyl)-, (±)-, (Z)-2-butenedioate (1:1) (±)-N-(6,11-Dihydrodibenzo(b,e)thiep-in-11-yl)-4-(p-fluorophenyl)-1-piperazinebutyramide maleate (1:1) CAS RN 132046-06-1), nicardipine, nisoldipine, nitrendipine, manidipine, pranidipine, and the like; T-channel calcium antagonists such as mibefradil; angiotensin converting enzyme (ACE) inhibitors such as benazepril, benazepril hydrochloride (such as 3-[[1-(ethoxycarbonyl)-3-phenyl-(1S)-propyl]amino]-2,3,4,5-tetrahydro-2-oxo-1H-1-(3S)-benzazepine-1-acetic acid monohydrochloride, e.g., Lotrel®, Novartis), captopril (such as 1-[(2S)-3-mercapto-2-methylpropionyl]-L-proline, e.g., Captopril, Mylan, CAS RN 62571-86-2 and others disclosed in U.S. Pat. No. 4,046,889), ceranapril (and others disclosed in U.S. Pat. No. 4,452,790), cetapril (alacepril, Dainippon disclosed in Eur. Therap. Res. 39:671 (1986); 40:543 (1986)), cilazapril (Hoffman-LaRoche) disclosed in J. Cardiovasc. Pharmacol. 9:39 (1987), indalapril (delapril hydrochloride (2H-1,2,4-Benzothiadiazine-7-sulfonamide, 3-bicyclo[2.2.1]hept-5-en-2-yl-6-chloro-3,4-dihydro-, 1,1-dioxide CAS RN 2259-96-3); disclosed in U.S. Pat. No. 4,385,051), enalapril (and others disclosed in U.S. Pat. No. 4,374,829), enalopril, enaloprilat, fosinopril, ((such as L-proline, 4-cyclohexyl-1-[[[2-methyl-1-(1-oxopropoxy) propoxy](4-phenylbutyl) phosphinyl]acetyl]-, sodium salt, trans-, e.g., Monopril, Bristol-Myers Squibb and others disclosed in U.S. Pat. No. 4,168,267), fosinopril sodium (L-Proline, 4-cyclohexyl-1-[[(R)-[(1S)-2-methyl-1-(1-ox- opropoxy)propox), imidapril, indolapril (Schering, disclosed in J. Cardiovasc. Pharmacol. 5:643, 655 (1983)), lisinopril (Merck), losinopril, moexipril, moexipril hydrochloride (3-Isoquinolinecarboxylic acid, 2-[(2S)-2-[[(1S)-1-(ethoxycarbonyl)-3-phenylpropyl]amino]-1-oxopropyl]-1,-2,3,4-tetrahydro-6,7-dimethoxy-, monohydrochloride, (3S)-CAS RN 82586-52-5), quinapril, quinaprilat, ramipril (Hoechsst) disclosed in EP 79022 and Curr. Ther. Res. 40:74 (1986), perindopril erbumine (such as 2S,3aS,7aS-1-[(S)—N—[(S)-1-Carboxybutyl]alanyl]hexahydro-2-indolinecarboxylic acid, 1-ethyl ester, compound with tert-butylamine (1:1), e.g., Aceon®, Solvay), perindopril (Servier, disclosed in Eur. J. clin. Pharmacol. 31:519 (1987)), quanipril (disclosed in U.S. Pat. No. 4,344,949), spirapril (Schering, disclosed in Acta. Pharmacol. Toxicol. 59 (Supp. 5):173 (1986)), tenocapril, trandolapril, zofenopril (and others disclosed in U.S. Pat. No. 4,316,906), rentiapril (fentiapril, disclosed in Clin. Exp. Pharmacol. Physiol. 10:131 (1983)), pivopril, YS980, teprotide (Bradykinin potentiator BPP9a CAS RN 35115-60-7), BRL 36,378 (Smith Kline Beecham, see EP80822 and EP60668), MC-838 (Chugai, see C. A. 102:72588v and Jap. J. Pharmacol. 40:373 (1986), CGS 14824 (Ciba-Geigy, 3-([1-ethoxycarbonyl-3-phenyl-(1S)-propyl]amino)-2,3,4,5-tetrahydro-2-ox-o-1-(3S)-benzazepine-1 acetic acid HCl, see U.K. Patent No. 2103614), CGS 16,617 (Ciba-Geigy, 3 (S)-[[(1S)-5-amino-1-carboxypentyl]amino]-2,3,4,5-tetrahydro-2-oxo-1H-1-benzazepine-1-ethanoic acid, see U.S. Pat. No. 4,473,575), Ru 44570 (Hoechst, see Arzneimittelforschung 34:1254 (1985)), R 31-2201 (Hoffman-LaRoche see FEBS Lett. 165:201 (1984)), CI925 (Pharmacologist 26:243, 266 (1984)), WY-44221 (Wyeth, see J. Med. Chem. 26:394 (1983)), and those disclosed in US2003006922 (paragraph 28), U.S. Pat. No. 4,337,201, U.S. Pat. No. 4,432,971 (phosphonamidates); neutral endopeptidase inhibitors such as omapatrilat (Vanlev®), CGS 30440, cadoxatril and ecadotril, fasidotril (also known as aladotril or alatriopril), sampatrilat, mixanpril, and gemopatrilat, AVE7688, ER4030, and those disclosed in U.S. Pat. No. 5,362,727, U.S. Pat. No. 5,366,973, U.S. Pat. No. 5,225,401, U.S. Pat. No. 4,722,810, U.S. Pat. No. 5,223,516, U.S. Pat. No. 4,749,688, U.S. Pat. No. 5,552,397, U.S. Pat. No. 5,504,080, U.S. Pat. No. 55,612,359, U.S. Pat. No. 5,525,723, EP0599444, EP0481522, EP0599444, EP0595610, EP0534363, EP534396, EP534492, EP0629627; endothelin antagonists such as tezosentan, A308165, and YM62899, and the like; vasodilators such as hydralazine (apresoline), clonidine (clonidine hydrochloride (1H-Imidazol-2-amine, N-(2,6-dichlorophenyl)4,5-dihydro-, monohydrochloride CAS RN 4205-91-8), catapres, minoxidil (loniten), nicotinyl alcohol (roniacol), diltiazemn hydrochloride (such as 1,5-Benzothiazepin-4(5H)-one,3-(acetyloxy)-5 [2-(dimethylamino)ethyl]-2,-3-dihydro-2(4-methoxyphenyl)-, monohydrochloride, (+)-cis, e.g., Tiazac®, Forest), isosorbide dinitrate (such as 1,4:3,6-dianhydro-D-glucitol 2,5-dinitrate e.g., Isordil® Titradose®, Wyeth-Ayerst), sosorbide mononitrate (such as 1,4:3,6-dianhydro-D-glucito-1,5-nitrate, an organic nitrate, e.g., Ismo®, Wyeth-Ayerst), nitroglycerin (such as 2,3 propanetriol trinitrate, e.g., Nitrostat® Parke-Davis), veraparnil hydrochloride (such as benzeneacetonitrile, (±)-(alpha)[3-[[2-(3,4 dimethoxyphenyl)ethyl]methylamino]propyl]-3,4-dimethoxy-(alpba)-(1-methylethyl) hydrochloride, e.g., Covera HS® Extended-Release, Searle), chromonar (which may be prepared as disclosed in U.S. Pat. No. 3,282,938), clonitate (Annalen 1870 155), droprenilamine (which may be prepared as disclosed in DE2521113), lidoflazine (which may be prepared as disclosed in U.S. Pat. No. 3,267,104); prenylanmine (which maybe prepared as disclosed in U.S. Pat. No. 3,152,173), propatyl nitrate (which may be prepared as disclosed in French Patent No. 1,103,113), mioflazine hydrochloride (1-piperazineacetamide, 3-(aminocarbonyl)-4-[4,4-bis(4-fluorophenyl)butyl]-N-(2,6-dichlorophenyl)-, dihydrochloride CAS RN 83898-67-3), mixidine (Benzeneethanamine, 3,4-dimethoxy-N-(1-methyl-2-pyrrolidinylidene)-Pyrrolidine, 2-[(3,4-dimethoxyphenethyl)imino]-1-methyl-1-Methyl-2-[(3,4-dimethoxyphenethyl)imino]pyrrolidine CAS RN 27737-38-8), miolsidomine (1,2,3-Oxadiazolium, 5-[(ethoxycarbonyl)amino]-3-(4-morpholinyl)-, inner salt CAS RN 25717-80-0), isosorbide mononitrate (D-Glucitol, 1,4:3,6-dianhydro-, 5-nitrate CAS RN 16051-77-7), erythrityl tetranitrate (1,2,3,4-Butanetetrol, tetranitrate, (2R,3S)-rel-CAS RN 7297-25-8), clonitrate(1,2-Propanediol, 3-chloro-, dinitrate (7CI, 8CI, 9CI) CAS RN 2612-33-1), dipyridamole Ethanol, 2,2′,2″,2′″-[(4,8-di-1-piperidinylpyrimido[5,4-d]pyrimidine-2,6-diyi)dinitrilojtetrakis- CAS RN 58-32-2), nicorandil (CAS RN 65141-46-0 3-), pyridinecarboxamide (N-[2-(nitrooxy)ethyl]-Nisoldipine-3,5-Pyridinedicarboxylic acid, 1,4-dihydro-2,6-dimethyl-4-(2-nitrophenyl)-, methyl 2-methylpropyl ester CAS RN 63675-72-9), nifedipine-3,5-Pyridinedicarboxylic acid, 1,4-dihydro-2,6-dimethyl-4-(2-nitrophenyl)-, dimethyl ester CAS RN 21829-25-4), perhexyline maleate (Piperidine, 2-(2,2-dicyclohexylethyl)-, (2Z)-2-butenedioate (1:1) CAS RN 6724-53-4), oxprenolol hydrochloride (2-Propanol, 1-[(1-methylethyl)amino]-3-[2-(2-propenyloxy)phenoxy]-, hydrochloride CAS RN 6452-73-9), pentrinitrol (1,3-Propanediol, 2,2-bis(nitrooxy)methyl]-, mononitrate (ester) CAS RN 1607-17-6), verapamil (Benzeneacetonitrile, α-[3-[[2-(3,4-dimethoxyphenyl)ethyl]-methylamino]propyl]-3,4-dimethoxy-α-(1-methylethyl)- CAS RN 52-53-9) and the like; angiotensin II receptor antagonists such as, aprosartan, zolasartan, olmesartan, pratosartan, FI6828K, RNH6270, candesartan (1H-Benzimidazole-7-carboxylic acid, 2-ethoxy-1-[[2′-(1H-tetrazol-5-yl)[1,1′-biphenyl]4-yl]methyl]- CAS RN 139481-59-7), candesartan cilexetil ((+/−)-1-(cyclohexylcarbonyloxy)ethyl-2-ethoxy-1-[[2′-(1H-tetrazol-5-yl)biphenyl-4-yl]-1H-benzimidazole carboxylate, CAS RN 145040-37-5, U.S. Pat. No. 5,703,110 and U.S. Pat. No. 5,196,444), eprosartan (3-[1-4-carboxyphenyln-ethyl)-2-n-butyl-imidazol-5-yl]-(2-thienylmethyl) propenoic acid, U.S. Pat. No. 5,185,351 and U.S. Pat. No. 5,650,650), irbesartan (2-n-butyl-3-[[2′-(1h-tetrazol-5-yl)biphenyl-4-yl]methyl]1,3-diazazspiro[4,4]non-1-en-4-one, U.S. Pat. No. 5,270,317 and U.S. Pat. No. 5,352,788), losartan (2-N-butyl-4-chloro-5-hydroxymethyl-[(2′-(1H-tetrazol-5-yl)biphenyl-4-yl)-methyl]imidazole, potassium salt, U.S. Pat. No. 5,138,069, U.S. Pat. No. 5,153,197 and U.S. Pat. No. 5,128,355), tasosartan (5,8-dihydro-2,4-dimethyl-8-[(2′-(1H-tetrazol-5-yl)[1,1′-biphenyl]4-yl)methyl]-pyrido[2,3-d]pyrimidin-7(6H)-one, U.S. Pat. No. 5,149,699), telmisartan (4′-[(1,4-dimethyl-2′-propyl-(2,6′-bi-1H-benzimidazol)-1′-yl)]-[1,1′-biphenyl]-2-carboxylic acid, CAS RN 144701-484, U.S. Pat. No. 5,591,762), milfasartan, abitesartan, valsartan (Diovan® (Novartis), (S)—N-valeryl-N-[[2′-(1H-tetrazol-5-yl)biphenyl-4-yl)methyl]valine, U.S. Pat. No. 5,399,578), EXP-3137 (2-N-butyl-4-chloro-1-[(2′-(1H-tetrazol-5-yl)biphenyl-4-yl)-methyl]imidazole-5-carboxylic acid, U.S. Pat. No. 5,138,069, U.S. Pat. No. 5,153,197 and U.S. Pat. No. 5,128,355), 3-(2′-(tetrazol-5-yl)-1,1′-biphen-4-yl)methyl-5,7-dimethyl-2-ethyl-3H-imidazo[4,5-b]pyridine, 4′[2-ethyl-4-methyl-6-(5,6,7,8-tetrahydroimidazo[1,2-a]pyridin-2-yl]-benzimidazol-1-yl]-methyl]-1,1′-biphenyl]-2- carboxylic acid, 2-butyl-6-(1-methoxy-1-methylethyl)-2-[2′-)1H-tetrazol-5-yl)biphenyl-4-ylmethyl]quinazolin4(3H)-one, 3-[2′-carboxybiphenyl-4-yl)methyl]-2-cyclopropyl-7-methyl-3H-imidazo[4,5-b]pyridine, 2-butyl-4-chloro-1-[(2′-tetrazol-5-yl)biphenyl-4-yl)methyl]imidazole-carboxylic acid, 2-butyl-4-chloro-1-[[2′-(1H-tetrazol-5-yl)[1,1′-biphenyl]-4-yl]methyl]-1H-imidazole-5-carboxylic acid-1-(ethoxycarbonyl-oxy)ethyl ester potassium salt, dipotassium 2-butyl-4-(methylthio)-1-[[2-[[[(propylamino)carbonyl]amino]-sulfonyl](1,1′-biphenyl)-4-yl]methyl]-1H-imidazole-5-carboxylate, methyl-2-[[4-butyl-2-methyl-6-oxo-5-[[2′-(1H-tetrazol-5-yl)-[1,1′-biphenyl]4-yl]methyl]-1-(6H)-pyrimidinyl]methyl]-3-thiophencarboxylate, 5-[(3,5-dibutyl-1H-1,2,4-triazol-1-yl)methyl]-2-[2-(1H-tetrazol-5-ylphenyl)]pyridine, 6-butyl-2-(2-phenylethyl)-5[[2′-(1H-tetrazol-5-yl)[1,1′-biphenyl]-4-methyl]pyrimidin-4-(3H)-one D,L lysine salt, 5-methyl-7-n-propyl-8-[[2′-(1H-tetrazol-5-yl)biphenyl-4-yl]methyl]-[1,2,4]-triazolo[1,5-c]pyrimidin-2(3H)-one, 2,7-diethyl-5-[[2′-(5-tetrazoly)biphenyl-4-yl]methyl]-5H-pyrazolo[1,5-b][1,2,4]triazole potassium salt, 2-[2-butyl-4,5-dihydro-4-oxo-3-[2′-(1H-tetrazol-5-yl)-4-biphenylmethyl]-3H-imidazol [4,5-c]pyridine-5-ylmethyl]benzoic acid, ethyl ester, potassium salt, 3-methoxy-2,6-dimethyl-4-[[2′(1H-tetrazol-5-yl)-1,1′-biphenyl-4-yl]methoxy]pyridine, 2-ethoxy-1-[[2′-(5-oxo-2,5-dihydro-1,2,4-oxadiazol-3-yl)biphenyl-4-yl]methyl]-1H-benzimidazole-7-carboxylic acid, 1-[N-(2′-(1H-tetrazol-5-yl)biphenyl-4-yl-methyl)-N-valerolylaminomethyl)cyclopentane-1-carboxylic acid, 7-methyl-2n-propyl-3-[[2′ 1H-tetrazol-5-yl)biphenyl-4-yl]methyl]-3H-imidazo[4,5-6]pyridine, 2-[5-[(2-ethyl-5,7-dimethyl-3H-imidazo[4,5-b]pyridine-3-yl)methyl]-2-quinolinylisodium benzoate, 2-butyl-6-chloro-4-hydroxymethyl-5-methyl-3-[[2′-(1H-tetrazol-5-yl)biphenyl-4-yl)methyl]pyridine, 2-[[[2-butyl-1-[(4-carboxyphenyl)methyl]-1H-imidazol-5-yl]methyl]amino]benzoic acid tetrazol-5-yl)biphenyl-4-yl]methyl]pyrimidin-6-one, 4(S)-[4-(carboxymethyl)phenoxy]-N-[2(R)-[4-(2-sulfobenzamido)imidazol-1-yl]octanoyl]-L-proline, 1-(2,6-dimethylphenyl)-4-butyl-1,3-dihydro-3-[[6-[2-(1H-tetrazol-5-yl)phenyl]-3-pyridinyl]methyl]-2H-imidazol-2-one, 5,8-ethano-5,8-dimethyl-2-n-propyl-5,6,7,8-tetrahydro-1-[[2′ (1H-tetrazol-5-yl)biphenyl-4-yl]methyl]-1H,4H-1,3,4a,8a-tetrazacyclopentanaphthalene-9-one, 4-[1-[2′-(1,2,3,4-tetrazol-5-yl)biphen-4-yl)methylamino]-5,6,7,8-tetrahydro-2-trifylquinazoline, 2-(2-chlorobenzoyl)imino-5-ethyl-3-[2′-(1H-tetrazole-5-yl)biphenyl-4-yl)methyl-1,3,4-thiadiazoline, 2-[5-ethyl-3-[2-(1H-tetrazole-5-yl)biphenyl-4-yl]methyl-1,3,4-thiazoline-2-ylidene]aminocarbonyl-1-cyclopentencarboxylic acid dipotassium salt, and 2-butyl-4-[N-methyl-N-(3-methylcrotonoyl)amino]-1-[[2′-(1H-tetrazol-5-yl)biphenyl-4-yl]methyl]-1H-imidzole-5-carboxylic acid 1-ethoxycarbonyloxyethyl ester, those disclosed in patent publications EP475206, EP497150, EP539086, EP539713, EP535463, EP535465, EP542059, EP497121, EP535420, EP407342, EP415886, EP424317, EP435827, EP433983, EP475898, EP490820, EP528762, EP324377, EP323841, EP420237, EP500297, EP426021, EP480204, EP429257, EP430709, EP434249, EP446062, EP505954, EP524217, EP514197, EP514198, EP514193, EP514192, EP450566, EP468372, EP485929, EP503162, EP533058, EP467207 EP399731, EP399732, EP412848, EP453210, EP456442, EP470794, EP470795, EP495626, EP495627, EP499414, EP499416, EP499415, EP511791, EP516392, EP520723, EP520724, EP539066, EP438869, EP505893, EP530702, EP400835, EP400974, EP401030, EP407102, EP411766, EP409332, EP412594, EP419048, EP480659, EP481614, EP490587, EP467715, EP479479, EP502725, EP503838, EP505098, EP505111 EP513,979 EP507594, EP510812, EP511767, EP512675, EP512676, EP512870, EP517357, EP537937, EP534706, EP527534, EP540356, EP461040, EP540039, EP465368, EP498723, EP498722, EP498721, EP515265, EP503785, EP501892, EP519831, EP532410, EP498361, EP432737, EP504888, EP508393, EP508445, EP403159, EP403158, EP425211, EP427463, EP437103, EP481448, EP488532, EP501269, EP500409, EP540400, EP005528, EP028834, EP028833, EP411507, EP425921, EP430300, EP434038, EP442473, EP443568, EP445811, EP459136, EP483683, EP518033, EP520423, EP531876, EP531874, EP392317, EP468470, EP470543, EP502314, EP529253, EP543263, EP540209, EP449699, EP465323, EP521768, EP415594, WO92/14468, WO93/08171, WO93/08169, WO91/00277, WO91/00281, WO91/14367, WO92/00067, WO92/00977, WO92/20342, WO93/04045, WO93/04046, WO91/15206, WO92/14714, WO92/09600, WO92/16552, WO93/05025, WO93/0301 8, WO91/07404, WO92/02508, WO92/13853, WO91/19697, WO91/11909, WO91/12001, WO91/11999, WO91/15209, WO91/15479, WO92/20687, WO92/20662, WO92/20661, WO93/01177, WO91/14679, WO91/13063, WO92/13564, WO91/17148, WO91/188.88, WO91/19715, WO92/02257, WO92/04335, WO92/05161, WO92/07852, WO92/15577, WO93/03033, WO91/16313, WO92/00068, WO92/025 10, WO92/09278, WO9210179, WO92/10180, WO92/10186, WO92/10181, WO92/10097, WO92/10183, WO92/10182, WO92/10187, WO92/10184, WO92/10188, WO92/10180, WO92/10185, WO92/20651, WO93/03722, WO93/06828, WO93/03040, WO92/19211, WO92/22533, WO92/0608 1, WO92/05784, WO93/0034 1, WO92/04343, WO92/04059, U.S. Pat. No. 5,104,877, U.S. Pat. No. 5,187,168, U.S. Pat. No. 5,149,699, U.S. Pat. No. 5,185,340, U.S. Pat. No. 4,880,804, U.S. Pat. No. 5,138,069, U.S. Pat. No. 4,916,129, U.S. Pat. No. 5,153,197, U.S. Pat. No. 5,173,494, U.S. Pat. No. 5,137,906, U.S. Pat. No. 5,155,126, U.S. Pat. No. 5,140,037, U.S. Pat. No. 5,137,902, U.S. Pat. No. 5,157,026, U.S. Pat. No. 5,053,329, U.S. Pat. No. 5,132,216, U.S. Pat. No. 5,057,522, U.S. Pat. No. 5,066,586, U.S. Pat. No. 5,089,626, U.S. Pat. No. 5,049,565, U.S. Pat. No. 5,087,702, U.S. Pat. No. 5,124,335, U.S. Pat. No. 5,102,880, U.S. Pat. No. 5,128,327, U.S. Pat. No. 5,151,435, U.S. Pat. No. 5,202,322, U.S. Pat. No. 5,187,159, U.S. Pat. No. 5,198,438, U.S. Pat. No. 5,182,288, U.S. Pat. No. 5,036,048, U.S. Pat. No. 5,140,036, U.S. Pat. No. 5,087,634, U.S. Pat. No. 5,196,537, U.S. Pat. No. 5,153,347, U.S. Pat. No. 5,191,086, U.S. Pat. No. 5,190,942, U.S. Pat. No. 5,177,097, U.S. Pat. No. 5,212,177, U.S. Pat. No. 5,208,234, U.S. Pat. No. 5,208,235, U.S. Pat. No. 5,212,195, U.S. Pat. No. 5,130,439, U.S. Pat. No. 5,045,540, U.S. Pat. No. 5,041,152, and U.S. Pat. No. 5,210,204, and pharmaceutically acceptable salts and esters thereof; α/β adrenergic blockers such as nipradilol, arotinolol, amosulalol, bretylium tosylate (CAS RN: 61-75-6), dihydroergtamine mesylate (such as ergotaman-3′, 6′,18-trione,9,-10-dihydro-12′-hydroxy-2′-methyl-5′-(phenylmethyl)-,(5′(α))-, monomethanesulfonate, e.g., DHE 45® Injection, Novartis), carvedilol (such as (±)-1-(Carbazol-4-yloxy)-3-[[2-(o-methoxyphenoxy)ethyl]amino]-2-propanol, e.g., Coreg®, SmithKline Beecham), labetalol (such as 5-[1-hydroxy-2-[(1-methyl-3-phenylpropyl) amino]ethyl]salicylamide monohydrochloride, e.g., Normodyne®, Schering), bretylium tosylate (Benzenemethanaminium, 2-bromo-N-ethyl-N,N-dimethyl-, salt with 4-methylbenzenesulfonic acid (1:1) CAS RN 61-75-6), phentolamine mesylate (Phenol, 3-[[(4,5-dihydro-1H-imidazol-2-yl)methyl](4-methylphenyl)amino]-, monomethanesulfonate (salt) CAS RN 65-28-1), solypertine tartrate (5H-1,3-Dioxolo[4,5-f]ndole, 7-[2-[4-(2-methoxyphenyl)-1-piperazinyl]ethyl]-, (2R,3R)-2,3-dihydroxybutanedioate (1:1) CAS RN 5591-43-5), zolertine hydrochloride (piperazine, 1-phenyl-4-[2-(1H-tetrazol-5-yl)ethyl]-, monohydrochloride (8Cl, 9Cl) CAS RN 7241-94-3) and the like;
α adrenergic receptor blockers, such as alfuzosin (CAS RN: 81403-68-1), terazosin, urapidil, prazosin (Minipress®), tamsulosin, bunazosin, trimazosin, doxazosin, naftopidil, indoramin, WHP 164, XEN010, fenspiride hydrochloride (which may be prepared as disclosed in U.S. Pat. No. 3,399,192), proroxan (CAS RN 33743-96-3), and labetalol hydrochloride and combinations thereof; a 2 agonists such as methyldopa, methyldopa HCL, lofexidine, tiamenidine, moxonidine, rilmenidine, guanobenz, and the like;
aldosterone inhibitors, and the like; renin inhibitors including Aliskiren (SPP100; Novartis/Speedel); angiopoietin-2-binding agents such as those disclosed in WO03/030833;
anti-angina agents such as ranolazine (hydrochloridel-piperazineacetamide, N-(2,6-dimethylphenyl)-4-[2-hydroxy-3-(2-methoxyphenoxy)propyl]-, dihydrochloride CAS RN 95635-56-6), betaxolol hydrochloride (2-Propanol, 1-[4-[2 (cyclopropylmethoxy)ethyl]phenoxy]-3-[(1-methylethyl)amino]-, hydrochloride CAS RN 63659-19-8), butoprozine hydrochloride (Methanone, [4-[3(dibutylamino)propoxy]phenyl](2-ethyl-3-indolizinyl)-, monohydrochloride CAS RN 62134-34-3), cinepazet maleatel-piperazineacetic acid, 4-[1-oxo-3-(3,4,5-trimethoxyphenyl)-2-propenyl]-, ethyl ester, (2Z)-2-butenedioate (1:1) CAS RN 50679-07-7), tosifen (Benzenesulfonamide, 4-methyl-N-[[[(1S)-1-methyl-2-phenylethyl]amino]carbonyl]- CAS RN 32295-184), verapamilhydrochloride (Benzeneacetonitrile, α-[3-[[2-(3,4-dimethoxyphenyl)ethyl]methylamino]propyl]-3,4-dimethoxy-α-(1-methylethyl)-, monohydrochloride CAS RN 152-114), molsidomine (1,2,3-Oxadiazolium, 5-[(ethoxycarbonyl)amino]-3-(4-morpholinyl)-, inner salt CAS RN 25717-80-0), and ranolazine hydrochloride (1-piperazineacetamide, N-(2,6-dimethylphenyl)-₄-[2-hydroxy-3-(2-meth- oxyphenoxy)propyl]-, dihydrochloride CAS RN 95635-56-6); tosifen (Benzenesulfonamide, 4-methyl-N-[[[(1S)-1-methyl-2-phenylethyl]amino]carbonyl]-CAS RN 32295-184); adrenergic stimulants such as guanfacine hydrochloride (such as N-amidino-2-(2,6-dichlorophenyl) acetamide hydrochloride, e.g., Tenex® Tablets available from Robins); methyldopa-hydrochlorothiazide (such as levo-3-(3,4-dihydroxyphenyl)-2-methylalanine) combined with Hydrochlorothiazide (such as 6-chloro-3,4-dihydro-2H-1,2,4-benzothiadiazine-7-sulfonamide 1,1-dioxide, e.g., the combination as, e.g., Aldoril® Tablets available from Merck), methyldopa-chlorothiazide (such as 6-chloro-2H-1,2,4-benzothiadiazine-7-sulfonamide 1,1-dioxide and methyldopa as described above, e.g., Aldoclor®, Merck), clonidine hydrochloride (such as 2-(2,6-dichlorophenylamino)-2-imidazoline hydrochloride and chlorthalidone. (such as 2-chloro-5-(1-hydroxy-3-oxo-1-isoindolinyl) benzenesulfonamide), e.g., Combipres®, Boehringer Ingelheim), clonidine hydrochloride (such as 2-(2,6-dichlorophenylamino)-2-imidazoline hydrochloride, e.g., Catapres®, Boehringer Ingelheim), clonidine (1H-Imidazol-2-amine, N-(2,6-dichlorophenyl)4,5-dihydro-CAS RN 4205-90-7), Hyzaar (Merck; a combination of losartan and hydrochlorothiazide), Co-Diovan (Novartis; a combination of valsartan and hydrochlorothiazide, Lotrel (Novartis; a combination of benazepril and amlodipine) and Caduet (Pfizer; a combination of armlodipine and atorvastatin), and those agents disclosed in US20030069221.

[0402] The peptides and agonists described herein can be used in combination therapy with one or more of the following agents useful in the treatment of respiratory and other disorders including but not limited to:

[0403] (1) β-agonists including but not limited to: albuterol (PROVENTIL®, SALBUTAMOI®, VENTOLIN®), bambuterol, bitoterol, clenbuterol, fenoterol, formoterol, isoetharine (BRONKOSOL®, BRONKOMETER®), metaproterenol (ALUPENT®, METAPREL®), pirbuterol (MAXAIR®), reproterol, rimiterol, salmeterol, terbutaline (BRETHAIRE®, BRETHINE®, BRICANYL®), adrenalin, isoproterenol (ISUPREL®), epinephrine bitartrate (PRIMATENE®), ephedrine, orciprenline, fenoterol and isoetharine;

[0404] (2) steroids, including but not limited to beclomethasone, beclomethasone dipropionate, betamethasone, budesonide, bunedoside, butixocort, dexarnethasone, flunisolide, fluocortin, fluticasone, hydrocortisone, methyl prednisone, mometasone, predonisolone, predonisone, tipredane, tixocortal, triancinolone, and triamcinolone acetonide;

[0405] (3) β2-agonist-corticosteroid combinations [e.g., salmeterol-fluticasone (ADVAIR®), formoterol-budesonid (SYMBICORT®)];

[0406] (4) leukotriene D4 receptor antagonists/leukotriene antagonists/LTD4 antagonists (i.e., any compound that is capable of blocking, inhibiting, reducing or otherwise interrupting the interaction between leukotrienes and the Cys LTI receptor) including but not limited to: zafirlukast, montelukast, montelukast sodium (SINGULAIR®), pranlukast, iralukast, pobilukast, SKB-106,203 and compounds described as having LTD4 antagonizing activity described in U.S. Pat. No. 5,565,473;

[0407] (5) 5-lipoxygenase inhibitors and/or leukotriene biosynthesis inhibitors [e.g., zileuton and BAY1005 (CA registry 128253-31-6)];

[0408] (6) histamine H1 receptor antagonists/antihistamines (i.e., any compound that is capable of blocking, inhibiting, reducing or otherwise interrupting the interaction between histamine and its receptor) including but not limited to: astemizole, acrivastine, antazoline, azatadine, azelastine, astamizole, bromopheniramine, bromopheniramine maleate, carbinoxamine, carebastine, cetirizine, chlorpheniramine, chloropheniramine maleate, cimetidine, clemastine, cyclizine, cyproheptadine, descarboethoxyloratadine, dexchlorpheniramine, dimethindene, diphenhydramine, diphenylpyraline, doxylamine succinate, doxylaamine, ebastine, efletirizine, epinastine, farnotidine, fexofenadine, hydroxyzine, hydroxyzine, ketotifen, levocabastine, levocetirizine, levocetirizine, loratadine, meclizine, mepyramine, mequitazine, methdilazine, mianserin, mizolastine, noberastine, norasternizole, noraztemizole, phenindamine, pheniramine, picumast, promethazine, pynlamine, pyrilamine, ranitidine, temelastine, terfenadine, trimeprazine, tripelenamine, and triprolidine;

[0409] (7) an anticholinergic including but not limited to: atropine, benztropine, biperiden, flutropium, hyoscyamine (e.g. Levsin®; Levbid®; Levsin/SL®, Anaspaz®, Levsinex timecaps®, NuLev®), ilutropium, ipratropium, ipratropium bromide, methscopolamine, oxybutinin, rispenzepine, scopolamine, and tiotropium;

[0410] (8) an anti-tussive including but not limited to: dextromethorphan, codeine, and hydromorphone;

[0411] (9) a decongestant including but not limited to: pseudoephedrine and phenylpropanolamine;

[0412] (10) an expectorant including but not limited to: guafenesin, guaicolsulfate, terpin, ammonium chloride, glycerol guaicolate, and iodinated glycerol;

[0413] (11) a bronchodilator including but not limited to: theophylline and aminophylline;

[0414] (12) an anti-inflammatory including but not limited to: fluribiprofen, diclophenac, indomethacin, ketoprofen, S-ketroprophen, tenoxicamn;

[0415] (13) a PDE (phosphodiesterase) inhibitor including but not limited to those disclosed herein;

[0416] (14) a recombinant humanized monoclonal antibody [e.g. xolair (also called omnalizuimab), rhuMab, and talizumab];

[0417] (15) a humanized lung surfactant including recombinant forms of surfactant proteins SP-B, SP-C or SP-D [e.g. SURFAXIN®, formerly known as dsc-1 04 (Discovery Laboratories)],

[0418] (16) agents that inhibit epithelial sodium channels (ENaC) such as amiloride and related compounds;

[0419] (17) antimicrobial agents used to treat pulmonary infections such as acyclovir, amikacin, amoxicillin, doxycycline, trimethoprin sulfamethoxazole, amphotericin B, azithromycin, clarithromycin, roxithromycin, clarithromycin, cephalosporins(ceffoxitin, cefmetazole etc), ciprofloxacin, ethambutol, gentimycin, ganciclovir, imipenem, isoniazid, itraconazole, penicillin, ribavirin, rifampin, rifabutin, amantadine, rimantidine, streptomycin, tobramycin, and vancomycin;

[0420] (18) agents that activate chloride secretion through Ca++ dependent chloride channels (such as purinergic receptor (P2Y(2) agonists);

[0421] (19) agents that decrease sputum viscosity, such as human recombinant DNase 1, (Pulmozyme®);

[0422] (20) nonsteroidal anti-inflammatory agents (acemetacin, acetaminophen, acetyl salicylic acid, alclofenac, alminoprofen, apazone, aspirin, benoxaprofen, bezpiperylon, bucloxic acid, carprofen, clidanac, diclofenac, diclofenac, diflunisal, diflusinal, etodolac, fenbufen, fenbufen, fenclofenac, fenclozic acid, fenoprofen, fentiazac, feprazone, flufenamic acid, flufenisal, flufenisal, fluprofen, flurbiprofen, flurbiprofen, furofenac, ibufenac, ibuprofen, indomethacin, indomethacin, indoprofen, isoxepac, isoxicam, ketoprofen, ketoprofen, ketorolac, meclofenamic acid, meclofenamic acid, mefenamic acid, mefenamic acid, miroprofen, mofebutazone, nabumetone oxaprozin, naproxen, naproxen, niflumic acid, oxaprozin, oxpinac, oxyphenbutazone, phenacetin, phenylbutazone, phenylbutazone, piroxicam, piroxicam, pirprofen, pranoprofen, sudoxicam,tenoxican, sulfasalazine, sulindac, sulindac, suprofen, tiaprofenic acid, tiopinac, tioxaprofen, tolfenamic acid, tolmetin, tolmetin, zidometacin, zomepirac, and zomepirac); and

[0423] (21) aerosolized antioxidant therapeutics such as S-Nitrosoglutathione.

[0424] The peptides and agonists described herein can be used in combination therapy with an anti-obesity agent. Suitable such agents include, but are not limited to:

11β HSD-1 (11-beta hydroxy steroid dehydrogenase type 1) inhibitors, such as BVT 3498, BVT 2733, 3-(1-adamantyl)-4-ethyl-5-(ethylthio)-4H-1,2,4-triazole, 3-(1-adamantyl)-5-(3,4,5-trimethoxyphenyl)-4-methyl-4H-1,2,4-triazole, 3-adamantanyl-4,5,6,7,8,9,10,11,12,3a-decahydro-1,2,4-triazolo[4,3-a][11]annulene, and those compounds disclosed in WO01/90091, WO01/90090, WO01/90092 and WO02/072084;
5HT antagonists such as those in WO03/037871, WO03/037887, and the like;
5HT1a modulators such as carbidopa, benserazide and those disclosed in U.S. Pat. No. 6,207,699, WO03/031439, and the like;
5HT2c (serotonin receptor 2c) agonists, such as BVT933, DPCA37215, IK264, PNU 22394, WAY161503, R-1065, SB 243213 (Glaxo Smith Kline) and YM 348 and those disclosed in U.S. Pat. No. 3,914,250, WO00/77010, WO02/36596, WO02/48124, WO02/10169, WO01/66548, WO02/44152, WO02/51844, WO02/40456, and WO02/40457;
5HT6 receptor modulators, such as those in WO03/030901, WO03/035061, WO03/039547, and the like;
acyl-estrogens, such as oleoyl-estrone, disclosed in del Mar-Grasa, M. et al., Obesity Research, 9:202-9 (2001) and Japanese Patent Application No. JP 2000256190; anorectic bicyclic compounds such as 1426 (Aventis) and 1954 (Aventis), and the compounds disclosed in WO00/18749, WO01/32638, WO01/62746, WO01/62747, and WO03/015769;
CB 1 (cannabinoid-1 receptor) antagonist/inverse agonists such as rimonabant (Acomplia; Sanofi), SR-147778 (Sanofi), SR-141716 (Sanofi), BAY 65-2520 (Bayer), and SLV 319 (Solvay), and those disclosed in patent publications U.S. Pat. No. 4,973,587, U.S. Pat. No. 5,013,837, U.S. Pat. No. 5,081,122, U.S. Pat. No. 5,112,820, U.S. Pat. No. 5,292,736, U.S. Pat. No. 5,532,237, U.S. Pat. No. 5,624,941, U.S. Pat. No. 6,028,084, U.S. Pat. No. 6,509,367, U.S. Pat. No. 6,509,367, WO96/33159, WO97/29079, WO98/31227, WO98/33765, WO98/37061, WO98/41519, WO98/43635, WO98/43636, WO99/02499, WO00/10967, WO00/10968, WO01/09120, WO01/58869, WO01/64632, WO01/64633, WO01/64634, WO01/70700, WO01/96330, WO02/076949, WO03/006007, WO03/007887, WO03/020217, WO03/026647, WO03/026648, WO03/027069, WO03/027076, WO03/027114, WO03/037332, WO03/040107, WO03/086940, WO03/084943 and EP658546;
CCK-A (cholecystokinin-A) agonists, such as AR-R 15849, GI 181771 (GSK), JMV-180, A-71378, A-71623 and SR146131 (Sanofi), and those described in U.S. Pat. No. 5,739,106;
CNTF (Ciliary neurotrophic factors), such as GI-181771 (Glaxo-SrnithKline), SR146131 (Sanofi Synthelabo), butabindide, PD170,292, and PD 149164 (Pfizer);
CNTF derivatives, such as Axokineg (Regeneron), and those disclosed in WO94/09134, WO98/22128, and WO99/43813;
dipeptidyl peptidase IV (DP-LV) inhibitors, such as isoleucine thiazolidide, valine pyrrolidide, NVP-DPP728, LAF237, P93/01, P 3298, TSL 225 (tryptophyl-1,2,3,4-tetrahydroisoquinoline-3-carboxylic acid; disclosed by Yamada et al, Bioorg. & Med. Chem. Lett. 8 (1998) 1537-1540), TMC-2λ/2B/2C, CD26 inhibtors, FE 999011, P9310/K364, VU) 0177, SDZ 274-444, 2-cyanopyrrolidides and 4-cyanopyrrolidides as disclosed by Ashworth et al, Bioorg. & Med. Chem. Lett., Vol. 6, No. 22, pp 1163-1166 and 2745-2748 (1996) and the compounds disclosed patent publications. WO99/38501, WO99/46272, WO99/67279 (Probiodrug), WO99/67278 (Probiodrug), WO99/61431 (Probiodrug), WO02/083128, WO02/062764, WO03/000180, WO03/000181, WO03/000250, WO03/002530, WO03/00253 1, WO03/002553, WO03/002593, WO03/004498, WO03/004496,WO03/017936, WO03/024942, WO03/024965, WO03/033524, WO03/037327 and EP1258476;
growth hormone secretagogue receptor agonists/antagonists, such as NN703, hexarelin, MK-0677 (Merck), SM-130686, CP-424391 (Pfizer), LY 444,711 (Eli Lilly), L-692,429 and L-163,255, and such as those disclosed in U.S. Ser. No. 09/662,448, U.S. provisional application 60/203,335, U.S. Pat. No. 6,358,951, US2002049196, US2002/022637, WO01/56592 and WO02/32888;
H3 (histamine H3) antagonist/inverse agonists, such as thioperamide, 3-(1H-imidazol-4-yl)propyl N-(4-pentenyl)carbamate), clobenpropit, iodophenpropit, imoproxifan, GT2394 (Gliatech), and A331440, O-[3-(1H-imidazol-4-yl)propanol]carbamates (Kiec-ICononowicz, K. et al., Pharmazie, 55:349-55 (2000)), piperidine-containing histamine H3-receptor antagonists (Lazewska, D. et al., Pharmazie, 56:927-32 (2001), benzophenone derivatives and related compounds (Sasse, A. et al., Arch. Pharm.(Weinheim) 334:45-52 (2001)), substituted N-phenylcarbamates (Reidemeister, S. et al., Pharmazie, 55:83-6 (2000)), and proxifan derivatives (Sasse, A. et al., J. Med. Chem. 43:3335-43 (2000)) and histamine H3 receptor modulators such as those disclosed in WO02/15905, WO03/024928 and WO03/024929;
leptin derivatives, such as those disclosed in U.S. Pat. No. 5,552,524, U.S. Pat. No. 5,552,523, U.S. Pat. No. 5,552,522, U.S. Pat. No. 5,521,283, WO96/23513, WO96/23514, WO96/23515, WO96/23516, WO96/23517, WO96/23518, WO96/23519, and WO96/23520;
leptin, including recombinant human leptin (PEG-OB, Hoffman La Roche) and recombinant methionyl human leptin (Amgen);
lipase inhibitors, such as tetrahydrolipstatin (orlistat/Xenical®), Triton WR1339, RHC80267, lipstatin, teasaponin, diethylumbelliferyl phosphate, FL-386, WAY-121898, Bay-N-3176, valilactone, esteracin, ebelactone A, ebelactone B, and RHC 80267, and those disclosed in patent publications WO01/77094, U.S. Pat. No. 4,598,089, U.S. Pat. No. 4,452,813, U.S. Pat. No. 5,512,565, U.S. Pat. No. 5,391,571, U.S. Pat. No. 5,602,151, U.S. Pat. No. 4,405,644, U.S. Pat. No. 4,189,438, and U.S. Pat. No. 4,242,453;
lipid metabolism modulators such as maslinic acid, erythrodiol, ursolic acid uvaol, betulinic acid, betulin, and the like and compounds disclosed in WO03/011267;
Mc4r (melanocortin 4 receptor) agonists, such as CHIR86036 (Chiron), ME-10142, mE-10145, and HS-131 (Melacure), and those disclosed in PCT publication Nos. WO99/64002, WO00/74679, WO01/991752, WO01/25192, WO01/52880, WO01/74844, WO01/70708, WO01/70337, WO01/91752, WO02/059095, WO02/059107, WO02/059108, WO02/059117, WO02/06276, WO02/12166, WO02/11715, WO02/12178, WO02/15909, WO02/38544, WO02/068387, WO02/068388, WO02/067869, WO02/081430, WO03/06604, WO03/007949, WO03/009847, WO03/009850, WO03/013509, and WO03/031410;
Mc5r (melanocortin 5 receptor) modulators, such as those disclosed in WO97/19952, WO00/15826, WO00/15790, US20030092041;
melanin-concentrating hormone 1 receptor (MCHR) antagonists, such as T-226296 (Takeda), SB 568849, SNP-7941 (Synaptic), and those disclosed in patent publications WO01/21169, WO01/82925, WO01/87834, WO02/051809, WO02/06245, WO02/076929, WO02/076947, WO02/04433, WO02/51809, WO02/083134, WO02/094799, WO03/004027, WO03/13574, WO03/15769, WO03/028641, WO03/035624, WO03/033476, WO03/033480, JP13226269, and JP1437059;
mGluR5 modulators such as those disclosed in WO03/029210, WO03/047581, WO03/048137, WO03/051315, WO03/051833, WO03/053922, WO03/059904, and the like;
serotoninergic agents, such as fenfluramine (such as Pondimin® (Benzeneethanamine, N-ethyl-alpha-methyl-3-(trifluoromethyl)-, hydrochloride), Robbins), dexfenfluramine (such as Redux® (Benzeneethanamine, N-ethyl-alpha-methyl-3-(trifluoromethyl)-, hydrochloride), Interneuron) and sibutramine ((Meridia®, Knoll/Reductil™) including racemic mixtures, as optically pure isomers (+) and (−), and pharmaceutically acceptable salts, solvents, hydrates, clathrates and prodrugs thereof including sibutramine hydrochloride monohydrate salts thereof, and those compounds disclosed in U.S. Pat. No. 4,746,680, U.S. Pat. No. 4,806,570, and U.S. Pat. No. 5,436,272, US20020006964, WO01/27068, and WO01/62341;
NE (norepinephrine) transport inhibitors, such as GW 320659, despiramine, talsupram, and nomifensine;
NPY 1 antagonists, such as BIBP3226, J-115814, BIBO 3304, LY-357897, CP-671906, GI-264879A, and those disclosed in U.S. Pat. No. 6,001,836, WO96/14307, WO01/23387, WO99/51600, WOO/85690, WO11/85098, WO00/85173, and WO01/89528;
NPY5 (neuropeptide Y Y5) antagonists, such as 152,804, GW-569180A, GW-594884A, GW-587081X, GW-548118X, FR235208, FR226928, FR240662, FR252384, 1229U91, GI-264879A, CGP71683A, LY-377897, LY-366377, PD-160170, SR-120562A, SR-120819A, JCF-104, and H409/22 and those compounds disclosed in patent publications U.S. Pat. No. 6,140,354, U.S. Pat. No. 6,191,160, U.S. Pat. No. 6,218,408, U.S. Pat. No. 6,258,837, U.S. Pat. No. 6,313,298, U.S. Pat. No. 6,326,375, U.S. Pat. No. 6,329,395, U.S. Pat. No. 6,335,345, U.S. Pat. No. 6,337,332, U.S. Pat. No. 6,329,395, U.S. Pat. No. 6,340,683, EP01010691, EP-01044970, WO97/19682, WO97/20820, WO97/20821, WO97/20822, WO97/20823, WO98/27063, WO00/107409, WO00/185714, WO00/185730, WO00/64880, WO00/68197, WO00/69849, WO/0113917, WO01/09120, WO01/14376, WO01/85714, WO01/85730, WO01/07409, WO01/02379, WO01/23388, WO01/23389, WO01/44201, WO01/62737, WO01/62738, WO01/09120, WO02/20488, WO02/22592, WO02/48152, WO02/49648, WO02/051806, WO02/094789, WO03/009845, WO03/014083, WO03/022849, WO03/028726 and Norman et al., J. Med. Chem. 43:4288-4312 (2000); opioid antagonists, such as nalmefene (REVEX®), 3-methoxynaltrexone, methylnaltrexone, naloxone, and naltrexone (e.g. PT901; Pain Therapeutics, Inc.) and those disclosed in U.S. Pat. No. 6,734,188, US20050004155 and WO00/21509; orexin antagonists, such as SB-334867-A and those disclosed in patent publications WO01/96302, WOO/68609, WO02/441 72, WO02/51232, WO02/51838, WO02/089800, WO02/090355, WO03/023561, WO03/032991, and WO03/037847;
PDE inhibitors (e.g. compounds which slow the degradation of cyclic AMP (cAMP) and/or cyclic GMP (cGMP) by inhibition of the phosphodiesterases, which can lead to a relative increase in the intracellular concentration of cAMP and cGMP; possible PDE inhibitors are primarily those substances which are to be numbered among the class consisting of the PDE3 inhibitors, the class consisting of the PDE4 inhibitors and/or the class consisting of the PDE5 inhibitors, in particular those substances which can be designated as mixed types of PDE3/4 inhibitors or as mixed types of PDE3/4/5 inhibitors) such as those disclosed in patent publications DE1470341, DE2108438, DE2123328, DE2305339, DE2305575, DE2315801, DE2402908, DE2413935, DE2451417, DE2459090, DE2646469, DE2727481, DE2825048, DE2837161, DE2845220, DE2847621, DE2934747, DE3021792, DE3038166, DE3044568, EP000718, EP0008408, EP0010759, EP0059948, EP0075436, EP0096517, EP0112987, EP0116948, EP0150937, EP0158380, EP0161632, EP0161918, EP0167121, EP0199127, EP0220044, EP0247725, EP0258191, EP0272910, EP0272914, EP0294647, EP0300726, EP0335386, EP0357788, EP0389282, EP0406958, EP0426180, EP0428302, EP0435811, EP0470805, EP0482208, EP0490823, EP0506194, EP0511865, EP0527117, EP0626939, EP0664289, EP0671389, EP0685474, EP0685475, EP0685479, JP92234389, JP94329652, JP95010875, U.S. Pat. No. 4,963,561, U.S. Pat. No. 5,141,931, WO9117991, WO9200968, WO9212961, WO9307146, WO9315044, WO9315045, WO9.318024, WO9319068, WO9319720, WO9319747, WO9319749, WO9319751, WO9325517, WO9402465, WO9406423, WO9412461, WO9420455, WO9422852, WO9425437, WO9427947, WO9500516, WO9501980, WO9503794, WO9504045, WO9504046, WO9505386, WO9508534, WO9509623, WO9509624, WO9509627, WO9509836, WO9514667, WO9514680, WO9514681, WO9517392, WO9517399, WO9519362, WO9522520, WO9524381, WO9527692, WO9528926, WO9535281, WO9535282, WO9600218, WO9601825, WO9602541, WO9611917, DE3142982, DE 1116676, DE2162096, EP0293063, EP0463756, EP0482208, EP0579496, EP0667345 U.S. Pat. No. 6,331,543, US20050004222 (including those disclosed in formulas I-XIII and paragraphs 37-39, 85-0545 and 557-577), WO9307124, EP0163965, EP0393500, EP0510562, EP0553174, WO9501338 and WO9603399, as well as PDE5 inhibitors (such as RX-RA-69, SCH-51866, KT-734, vesnarinone, zaprinast, SKF-96231, ER-21355, BF/GP-385, NM-702 and sildenafil (Viagra™)), PDE4 inhibitors (such as etazolate, ICI63197, RP73401, imazolidinone (RO-20-1724), MEM 1414 (R1533/R1500; PharmaciaRoche), denbufylline, rolipram, oxagrelate, nitraquazone, Y-590, DH-6471, SKF-94120, motapizone, lixazinone, indolidan, olprinone, atizoram, KS-506-G, dipamfylline, BMY-43351, atizoram, arofylline, filaminast, PDB-093, UCB-29646, CDP-840, SKF-107806, piclamilast, RS-17597, RS-25344-000, SB-207499, TIBENELAST, SB-210667, SB-211572, SB-211600, SB-212066, SB-212179, GW-3600, CDP-840, mopidamol, anagrelide, ibudilast, aminone, pimobendan, cilostazol, quazinone and N-(3,5-dichloropyrid-4-yl)-3-cyclopropylmethoxy-4-difluoromethoxybenzamide, PDE3 inhibitors (such as ICI153, 100, bemorandane (RWJ 22867), MCI-154, UD-CG 212, sulmazole, ampizone, cilostamide, carbazeran, piroximone, imazodan, CI-930, siguazodan, adibendan, saterinone, SKF-95654, SDZ-MKS-492, 349-U-85, emoradan, EMD-53998, EMD-57033, NSP-306, NSP-307, revizinone, NM-702, WIN-62582 and WIN-63291, enoximone and milrinone, PDE3/4 inhibitors (such as benafentrine, trequinsin, ORG-30029, zardaverine, L-686398, SDZ-ISQ-844, ORG-20241, EMD-54622, and tolafentrine) and other PDE inhibitors (such as vinpocetin, papaverine, enprofylline, cilomilast, fenoximone, pentoxifylline, roflumilast, tadalafil(Cialis®), theophylline, and vardenafil(Levitra®); Neuropeptide Y2 (NPY2) agonists include but are not limited to: peptide YY and fragments and variants thereof (e.g. YY3-36 (PYY3-36)(N. Engl. J. Med. 349:941, 2003; IKPEAPGE DASPEELNRY YASLRHYLNL VTRQRY (SEQ ID NO:XXX)) and PYY agonists such as those disclosed in WO02/47712, WO03/026591, WO03/057235, and WO03/027637;
serotonin reuptake inhibitors, such as, paroxetine, fluoxetine (Prozac™), fluvoxamine, sertraline, citalopram, and imipramine, and those disclosed in U.S. Pat. No. 6,162,805, U.S. Pat. No. 6,365,633, WO03/00663, WO01/27060, and WO01/162341;
thyroid hormone β agonists, such as KB-2611 (KaroBioBMS), and those disclosed in WO02/15845, WO97/21993, WO99/00353, GB98/28M25, U.S. Provisional Application No. 60/183,223, and Japanese Patent Application No. JP 2000256190;
UCP-1 (uncoupling protein-1), 2, or 3 activators, such as phytanic acid, 4-[(E)-2-(5,6,7,8-tetrahydro-5,5,8,8-tetramethyl-2-napthalenyl)-1-propenyl]benzoic acid (TTNPB), retinoic acid, and those disclosed in WO99/00123;
β3 (beta adrenergic receptor 3) agonists, such as AJ9677/TAK677 (Dainippon/Takeda), L750355 (Merck), CP331648 (Pfizer), CL-316,243, SB 418790, BRL-37344, L-796568, BMS-196085, BRL-35135A, COP12177A, BTA-243, GW 427353, Trecadrine, Zeneca D7114, N-5984 (Nisshin Kyorin), LY-377604 (Lilly), SR 59119A, and those disclosed in U.S. Pat. No. 5,541,204, U.S. Pat. No. 5,770,615, U.S. Pat. No. 5,491,134, U.S. Pat. No. 5,776,983, U.S. Pat. No. 488,064, U.S. Pat. No. 5,705,515, U.S. Pat. No. 5,451,677, WO94/18161, WO95/29159, WO97/46556, WO98/04526 and WO98/32753, WO01/74782, WO02/32897, WO03/014113, WO03/016276, WO03/016307, WO03/024948, WO03/024953 and WO03/037881;
noradrenergic agents including, but not limited to, diethylpropion (such as Tenuate® (1-propanone, 2-(diethylamino)-1-phenyl-, hydrochloride), Merrell), dextroamphetamine (also known as dextroamphetarrine sulfate, dexamphetamine, dexedrine, Dexampex, Ferndex, Oxydess II, Robese, Spancap #1), mazindol ((or 5-(p-chlorophenyl)-2,5-dihydro-3H-imidazo[2,1-a]isoindol-5-ol) such as Sanorex®, Novartis or Mazanor®, Wyeth Ayerst), phenylpropanolamine (or Benzenemethanol, alpha-(1-aminoethyl)-, hydrochloride), phentermine ((or Phenol, 3-[[4,5-duhydro-1H-imidazol-2-yl)ethyl](4-methylpheny-1)amino], monohydrochloride) such as Adipex-P®, Lemmnon, FASTIN®, Smith-Kline Beecham and Ionamin®, Medeva), phendimetrazine ((or (2S,3S)-3,4-Dimethyl-2-phenylmorpholine L-(+)-tartrate (1:1)) such as Metra® (Forest), Plegine® (Wyeth-Ayerst), Prelu-2® (Boehringer Ingelheim), and Statobex® (Lemmon), phendamine tartrate (such as Thephorin® (2,3,4,9-Tetrahydro-2-methyl-9-phenyl-1H-indenol[2,1-c]pyridine L-(+)-tartrate (1:1)), Hoffmann-LaRoche), methamphetamine (such as Desoxyn®, Abbot ((S)—N, (alpha)-dimethylbenzeneethanamine hydrochloride)), and phendimetrazine tartrate (such as Bontril® Slow-Release Capsules, Amarin (-3,4-Dimethyl-2-phenylmorpholine Tartrate);
fatty acid oxidation upregulator/inducers such as Famoxin® (Genset);
monamine oxidase inhibitors including but not limited to befloxatone, moclobemide, brofaromine, phenoxathine, esuprone, befol, toloxatone, pirlindol, amiflamine, sercloremine, bazinaprine, lazabemide, milacemide, caroxazone and other certain compounds as disclosed by WO01/12176; and
other anti-obesity agents such as 5HT-2 agonists, ACC (acetyl-CoA carboxylase) inhibitors such as those described in WO03/072197, alpha-lipoic acid (alpha-LA), AOD9604, appetite suppressants such as those in WO03/40107, ATL-962 (Alizyme PLC), benzocaine, benzphetamine hydrochloride (Didrex), bladderwrack (focus vesiculosus), BRS3 (bombesin receptor subtype 3) agonists, bupropion, caffeine, CCK agonists, chitosan, chromium, conjugated linoleic acid, corticotropin-releasing hormone agonists, dehydroepiandrosterone, DGAT1 (diacylglycerol acyltransferase 1) inhibitors, DGAT2 (diacylglycerol acyltransferase 2) inhibitors, dicarboxylate transporter inhibitors, ephedra, exendin4 (an inhibitor of glp-1) FAS (fatty acid synthase) inhibitors (such as Cerulenin and C75), fat resorption inhibitors (such as those in WO03/05345 1, and the like), fatty acid transporter inhibitors, natural water soluble fibers (such as psyllium, plantago, guar, oat, pectin), galanin antagonists, galega (Goat's Rue, French Lilac), garcinia cambogia, germander (teucrium chamaedrys), ghrelin antibodies and ghrelin antagonists (such as those disclosed in WO01/87335, and WO02/08250), peptide hormones and variants thereof which affect the islet cell secretion, such as the hormones of the secretin/gastic inhibitory peptide (GIP)/vasoactive intestinal peptide (VIP)/pituitary adenylate cyclase activating peptide (PACAP)/glucagon-like peptide II (GLP-II)/glicentin/glucagon gene family and/or those of the adrenomedullin/amylin/calcitonin gene related peptide (CGRP) gene family including GLP-1 (glucagon-like peptide 1) agonists (e.g. (1) exendin-4, (2) those GLP-1 molecules described in US20050130891 including GLP-1(7-34), GLP-1(7-35), GLP-1(7-36) or GLP-1(7-37) in its C-terminally carboxylated or amidated form or as modified GLP-1 peptides and modifications thereof including those described in paragraphs 17-44 of US20050130891, and derivatives derived from GLP-1-(7-34)COOH and the corresponding acid amide are employed which have the following general formula:

R-NH-HAEGTFTSDVSYLEGQAAKEFIAWLVK-CONH₂

wherein R═H or an organic compound having from 1 to 10 carbon atoms. Preferably, R is the residue of a carboxylic acid. Particularly preferred are the following carboxylic acid residues: formyl, acetyl, propionyl, isopropionyl, methyl, ethyl, propyl, isopropyl, n-butyl, sec-butyl, tert-butyl.) and glp-1 (glucagon-like peptide-1), glucocorticoid antagonists, glucose transporter inhibitors, growth hormone secretagogues (such as those disclosed and specifically described in U.S. Pat. No. 5,536,716), interleukin-6 (IL-6) and modulators thereof (as in WO03/057237, and the like), L-carnitine, Mc3r (melanocortin 3 receptor) agonists, MCH₂R (melanin concentrating hormone 2R) agonist/antagonists, melanin concentrating hormone antagonists, melanocortin agonists (such as Melanotan II or those described in WO 99/64002 and WO 00/74679), nomane herba, phosphate transporter inhibitors, phytopharm compound 57 (CP 644,673), pyruvate, SCD-1 (stearoyl-CoA desaturase-1) inhibitors, T71 (Tularik, Inc., Boulder Colo.), Topiramate (Topimax®, indicated as an anti-convulsant which has been shown to increase weight loss), transcription factor modulators (such as those disclosed in WO03/026576), β-hydroxy steroid dehydrogenase-1 inhibitors (β-HSD-1), β-hydroxy-β-methylbutyrate, p57 (Pfizer), Zonisamide (Zonegran™, indicated as an anti-epileptic which has been shown to lead to weight loss), and the agents disclosed in US20030119428 paragraphs 20-26.

[0425] The peptides and agonists described herein can be used in therapeutic combination with one or more anti-diabetic agents, including but not limited to:

PPARγ agonists such as glitazones (e.g., WAY-120,744, AD 5075, balaglitazone, ciglitazone, darglitazone (CP-86325, Pfizer), englitazone (CP-68722, Pfizer), isaglitazone (MIT/J&J), MCC-555 (Mitsibishi disclosed in U.S. Pat. No. 5,594,016), pioglitazone (such as such as Actos™ pioglitazone; Takeda), rosiglitazone (Avandia™; Smith Kline Beecham), rosiglitazone maleate, troglitazone (Rezulin®, disclosed in U.S. Pat. No. 4,572,912), rivoglitazone (CS-011, Sankyo), GL-262570 (Glaxo Welcome), BRIA9653 (disclosed in WO98/05331), CLX-0921, 5-BTZD, GW-0207, LG-100641, JJT-501 (JPNT/P&U), L-895645 (Merck), R-119702 (Sankyo/Pfizer), NN-2344 (Dr. Reddy/NN), YM-440 CYamanouchi), LY-300512, LY-519818, R483 (Roche), T131 (Tularik), and the like and compounds disclosed in U.S. Pat. No. 4,687,777, U.S. Pat. No. 5,002,953, U.S. Pat. No. 5,741,803, U.S. Pat. No. 5,965,584, U.S. Pat. No. 6,150,383, U.S. Pat. No. 6,150,384, U.S. Pat. No. 6,166,042, U.S. Pat. No. 6,166,043, U.S. Pat. No. 6,172,090, U.S. Pat. No. 6,211,205, U.S. Pat. No. 6,271,243, U.S. Pat. No. 6,288,095, U.S. Pat. No. 6,303,640, U.S. Pat. No. 6,329,404, U.S. Pat. No. 5,994,554, WO97/10813, WO97/27857,WO97/28115,WO97/28137,WO97/27847, WO00/76488, WO03/000685,WO03/027112,WO03/035602, WO03/048130,WO03/055867, and pharmaceutically acceptable salts thereof;
biguanides such as metformin hydrochloride (N,N-dimethylimidodicarbonimidic diamide hydrochloride, such as Glucophage™, Bristol-Myers Squibb); metformin hydrochloride with glyburide, such as Glucovance™, Bristol-Myers Squibb); buformin (Imidodicarbonimidic diamide, N-butyl-); etoformine (1-Butyl-2-ethylbiguanide, Schering A. G.); other metformin salt forms (including where the salt is chosen from the group of, acetate, benzoate, citrate, ftimarate, embonate, chlorophenoxyacetate, glycolate, palmoate, aspartate, methanesulphonate, maleate, parachlorophenoxyisobutyrate, formate, lactate, succinate, sulphate, tartrate, cyclohexanecarboxylate, hexanoate, octanoate, decanoate, hexadecanoate, octodecanoate, benzenesulphonate, trimethoxybenzoate, paratoluenesulphonate, adamantanecarboxylate, glycoxylate, glutarnate, pyrrolidonecarboxylate, naphthalenesulphonate, 1-glucosephosphate, nitrate, sulphite, dithionate and phosphate), and phenformin;
protein tyrosine phosphatase-1B (PTP-1B) inhibitors, such as A-401,674, KR 61639, OC-060062, OC-83839, OC-297962, MC52445, MC52453, ISIS 113715, and those disclosed in WO99/585521, WO99/58518, WO99/58522, WO99/61435, WO03/032916, WO03/032982, WO03/041729, WO03/055883, WO02/26707, WO02/26743, JP2002114768, and pharmaceutically acceptable salts and esters thereof; sulfonylureas such as acetohexamide (e.g. Dympelor, Eli Lilly), carbutamide, chlorpropamide (e.g. Diabinese®, Pfizer), gliamilide (Pfizer), gliclazide (e.g. Diamcron, Servier Canada Inc), glimepiride (e.g. disclosed in U.S. Pat. No. 4,379,785, such as Amaryl™, Aventis), glipentide, glipizide (e.g. Glucotrol or Glucotrol XL Extended Release, Pfizer), gliquidone, glisolamide, glyburide/glibenclamide (e.g. Micronase or Glynase Prestab, Pharmacia & Upjohn and Diabeta, Aventis), tolazamide (e.g. Tolinase), and tolbutamide (e.g. Orinase), and pharmaceutically acceptable salts and esters thereof; meglitinides such as repaglinide (e.g. Pranidin®, Novo Nordisk), KAD1229 (PF/Kissei), and nateglinide (e.g. Starlix®, Novartis), and pharmaceutically acceptable salts and esters thereof;
α glucoside hydrolase inhibitors (or glucoside inhibitors) such as acarbose (e.g. Precose™, Bayer disclosed in U.S. Pat. No. 4,904,769), miglitol (such as GLYSET™, Pharmacia & Upjohn disclosed in U.S. Pat. No. 4,639,436), camiglibose (Methyl 6-deoxy-6-[(2R,3R,4R,5S)-3,4,5-trihydroxy-2-(hydroxymethyl)piperidino]-alpha-D-glucopyranoside, Marion Merrell Dow), voglibose (Takeda), adiposine, emiglitate, pradimicin-Q, salbostatin, CKD-711, MDL-25,637, MDL-73,945, and MOR 14, and the compounds disclosed in U.S. Pat. No. 4,062,950, U.S. Pat. No. 4,174,439, U.S. Pat. No. 4,254,256, U.S. Pat. No. 4,701,559, U.S. Pat. No. 4,639,436, U.S. Pat. No. 5,192,772, U.S. Pat. No. 4,634,765, U.S. Pat. No. 5,157,116, U.S. Pat. No. 5,504,078, U.S. Pat. No. 5,091,418, U.S. Pat. No. 5,217,877, U.S. Pat. No. 51,091 and WO01/47528 (polyamines);
α-amylase inhibitors such as tendamistat, trestatin, and A1-3688, and the compounds disclosed in U.S. Pat. No. 4,451,455, U.S. Pat. No. 4,623,714, and U.S. Pat. No. 4,273,765;
SGLT2 inhibitors including those disclosed in U.S. Pat. No. 6,414,126 and U.S. Pat. No. 6,515,117;
an aP2 inhibitor such as disclosed in U.S. Pat. No. 6,548,529;
insulin secreatagogues such as linogliride, A-4166, forskilin, dibutyrl cAMP, isobutylmethylxanthine (IBMX), and pharmaceutically acceptable salts and esters thereof;
fatty acid oxidation inhibitors, such as clomoxir, and etomoxir, and pharmaceutically acceptable salts and esters thereof;
A2 antagonists, such as midaglizole, isaglidole, deriglidole, idazoxan, earoxan, and fluparoxan, and pharmaceutically acceptable salts and esters thereof;
insulin and related compounds (e.g. insulin mimetics) such as biota, LP-100, novarapid, insulin detemir, insulin lispro, insulin glargine, insulin zinc suspension (lente and ultralente), Lys-Pro insulin, GLP-1 (1-36) amide, GLP-1 (73-7) (insulintropin, disclosed in U.S. Pat. No. 5,614,492), LY-315902 (Lilly), GLP-1 (7-36)-NH2), AL-401 (AutoImmune), certain compositions as disclosed in U.S. Pat. No. 4,579,730, U.S. Pat. No. 4,849,405, U.S. Pat. No. 4,963,526, U.S. Pat. No. 5,642,868, U.S. Pat. No. 5,763,396, U.S. Pat. No. 5,824,638, U.S. Pat. No. 5,843,866, U.S. Pat. No. 6,153,632, U.S. Pat. No. 6,191,105, and WO 85/05029, and primate, rodent, or rabbit insulin including biologically active variants thereof including allelic variants, more preferably human insulin available in recombinant form (sources of human insulin include pharmaceutically acceptable and sterile formulations such as those available from Eli Lilly (Indianapolis, Ind. 46285) as Humulin™ (human insulin rDNA origin), also see the THE PHYSICIAN'S DESK REFERENCE, 55.sup.th Ed. (2001) Medical Economics, Thomson Healthcare (disclosing other suitable human insulins); non-thiazolidinediones such as JT-501 and farglitazar (GW-2570/GI-262579), and pharmaceutically acceptable salts and esters thereof;
PPARα/γ dual agonists such as AR-HO39242 (Aztrazeneca), GW-409544 (Glaxo-Wellcome), BVT-142, CLX-0940, GW-1536, GW-1929, GW-2433, KRP-297 (Kyorin Merck; 5-[(2,4-Dioxo thiazolidinyl)methyl]methoxy-N-[[4-(trifluoromethyl)phenyl]methyl]benzamide), L-796449, LR-90, MK-0767 (Merck/Kyorin/Banyu), SB 219994, muraglitazar (BMS), tesaglitzar (Astrazeneca), reglitazar (JTT-501) and those disclosed in WO99/16758, WO99/19313, WO99/20614, WO99/38850, WO00/23415, WO00/23417, WO00/23445, WO00/50414, WO01/00579, WO01/79150, WO02/062799, WO03/004458, WO03/016265, WO03/018010, WO03/033481, WO03/033450, WO03/033453, WO03/043985, WO 031053976, U.S. application Ser. No. 09/664,598, filed Sep. 18, 2000, Murakami et al. Diabetes 47, 1841-1847 (1998), and pharmaceutically acceptable salts and esters thereof;
other insulin sensitizing drugs;
VPAC2 receptor agonists;
GLK modulators, such as those disclosed in WO03/015774;
retinoid modulators such as those disclosed in WO03/000249;
GSK 3β/GSK 3 inhibitors such as 4-[2-(2-bromophenyl)-4-(4-fluorophenyl-1H-imidazol-5-yl]pyridine and those compounds disclosed in WO03/024447, WO03/037869, WO03/037877, WO03/037891, WO03/068773, EP1295884, EP1295885, and the like;
glycogen phosphorylase (HGLPa) inhibitors such as CP-368,296, CP-316,819, BAYR3401, and compounds disclosed in WO01/94300, WO02/20530, WO03/037864, and pharmaceutically acceptable salts or esters thereof;
ATP consumption promotors such as those disclosed in WO03/007990;
TRB3 inhibitors;
vanilloid receptor ligands such as those disclosed in WO03/049702;
hypoglycemic agents such as those disclosed in WO03/015781 and WO03/040114;
glycogen synthase kinase 3 inhibitors such as those disclosed in WO03/035663 agents such as those disclosed in WO99/51225, US20030134890, WO01/24786, and WO03/059870;
insulin-responsive DNA binding protein-1 (IRDBP-1) as disclosed in WO03/057827, and the like;
adenosine A2 antagonists such as those disclosed in WO03/035639, WO03/035640, and the like;
PPARδ agonists such as GW 501516, GW 590735, and compounds disclosed in JP10237049 and WO02/14291;
dipeptidyl peptidase TV (DP-IV) inhibitors, such as isoleucine thiazolidide, NVP-DPP728A (1-[[[2-[(5-cyanopyridin-2-yl)amino]ethyl]amino]acetyl]-2-cyano-(S)-pyrrolidine, disclosed by Hughes et al, Biochemistry, 38(36), 11597-11603, 1999), P32/98, NVP-LAF-237, P3298, TSL225 (tryptophyl-1,2,3,4tetrahydro-isoquinoline-3-carboxylic acid, disclosed by Yamada et al, Bioorg. & Med. Chem. Lett. 8 (1998) 1537-1540), valine pyrrolidide, TMC-2A/2B/2C, CD-26 inhibitors, FE99901 1, P93 10/K364, VIP 0177, DPP4, SDZ 274-444, 2-cyanopyrrolidides and 4-cyanopyrrolidides as disclosed by Ashworth et al, Bioorg. & Med. Chem. Lett., Vol. 6, No. 22, pp 1163-1166 and 2745-2748 (1996), and the compounds disclosed in U.S. Pat. No. 6,395,761, U.S. Pat. No. 6,573,287, U.S. Pat. No. 6,395,767 (compounds disclosed include BMS-477118, BMS-471211 and BMS 538,305), WO99/38501, WO99/46272, WO99/67279, WO99/67278, WO99/61431 WO03/004498, WO03/004496, EP1258476, WO02/083128, WO02/062764, WO03/000250, WO03/002530, WO03/002531, WO03/002553, WO03/002593, WO03/000180, and WO03/000181;
GLP-1 agonists such as exendin-3 and exendin-4 (including the 39 aa peptide synthetic exendin-4 called Exenatide®), and compounds disclosed in US2003087821 and NZ 504256, and pharmaceutically acceptable salts and esters thereof; peptides including amlintide and Symlin® (pramlintide acetate); and glycokinase activators such as those disclosed in US2002103199 (fused heteroaromatic compounds) and WO02/48106 (isoindolin-1-one-substituted propionamide compounds).

[0426] The peptides and agonists described herein useful in the treatment of obesity can be administered as a cotherapy with electrostimulation (US20040015201).

[0427] The peptides and agonists described herein can be used in combination therapy with agents that activate soluble guanylate cyclase, for example those described in US20040192680.

[0428] The peptides and agonists described herein can be used in combination therapy with a phosphodiesterase inhibitor. PDE inhibitors are those compounds which slow the degradation of cyclic AMP (cAMP) and/or cyclic GMP (cGMP) by inhibition of the pbosphodiesterases, which can lead to a relative increase in the intracellular concentration of cAMP and/or cGMP. Possible PDE inhibitors are primarily those substances which are to be numbered among the class consisting of the PDE3 inhibitors, the class consisting of the PDE4 inhibitors and/or the class consisting of the PDE5 inhibitors, in particular those substances which can be designated as mixed types of PDE3/4 inhibitors or as mixed types of PDE3/4/5 inhibitors. By way of example, those PDE inhibitors may be mentioned such as are described and/or claimed in the following patent applications and patents: DE1470341, DE2108438, DE2123328, DE2305339, DE2305575, DE2315801, DE2402908, DE2413935, DE2451417, DE2459090, DE2646469, DE2727481, DE2825048, DE2837161, DE2845220, DE2847621, DE2934747, DE3021792, DE3038166, DE3044568, EP000718, EP0008408, EP000759, EP0059948, EP0075436, EP0096517, EP0112987, EP0116948, EP0150937, EP0158380, EP0161632, EP0161918, EP0167121, EP0199127, EP0220044, EP0247725, EP0258191, EP0272910, EP0272914, EP0294647, EP0300726, EP0335386, EP0357788, EP0389282, EP0406958, EP0426180, EP0428302, EP0435811, EP0470805, EP0482208, EP0490823, EP0506194, EP0511865, EP0527117, EP0626939, EP0664289, EP0671389, EP0685474, EP0685475, EP0685479, JP92234389, JP94329652, JP95010875, U.S. Pat. Nos. 4,963,561, 5,141,931, WO9117991, WO9200968, WO9212961, WO9307146, WO9315044, WO9315045, WO9318024, WO9319068, WO9319720, WO9319747, WO9319749, WO9319751, WO9325517, WO9402465, WO9406423, WO9412461, WO9420455, WO9422852, WO9425437, WO9427947, WO9500516, WO9501980, WO9503794, WO9504045, WO9504046, WO9505386, WO9508534, WO9509623, WO9509624, WO9509627, WO9509836, WO9514667, WO9514680, WO9514681, WO9517392, WO9517399, WO9519362, WO9522520, WO9524381, WO9527692, WO9528926, WO9535281, WO9535282, WO9600218, WO9601825, WO9602541, WO9611917, DE3142982, DE1116676, DE2162096, EP0293063, EP0463756, EP0482208, EP0579496, EP0667345 U.S. Pat. No. 6,331,543, US20050004222 (including those disclosed in formulas I-XIII and paragraphs 37-39, 85-0545 and 557-577) and WO9307124, EP0163965, EP0393500, EP0510562, EP0553174, WO9501338 and WO9603399. PDE5 inhibitors which may be mentioned by way of example are RX-RA-69, SCH-51866, KT-734, vesnarinone, zaprinast, SKF-96231, ER-21355, BF/GP-385, NM-702 and sildenafil (Viagra®). PDE4 inhibitors which may be mentioned by way of example are RO-20-1724, MEM 1414 (R1533/R1500; Pharmacia Roche), DENBUFYLLINE, ROLIPRAM, OXAGRELATE, NITRAQUAZONE, Y-590, DH-6471, SKF-94120, MOTAPIZONE, LIXAZINONE, INDOLIDAN, OLPRINONE, ATIZORAM, KS-506-G, DIPAMFYLLINE, BMY-43351, ATIZORAM, AROFYLLINE, FILAMINAST, PDB-093, UCB-29646, CDP-840, SKF-107806, PICLAMILAST, RS-17597, RS-25344-000, SB-207499, TIBENELAST, SB-210667, SB-211572, SB-211600, SB-212066, SB-212179, GW-3600, CDP-840, MOPIDAMOL, ANAGRELIDE, IBUDILAST, AMRINONE, PIMOBENDAN, CILOSTAZOL, QUAZINONE and N-(3,5-dichloropyrid-4-yl)-3-cyclopropylmethoxy-4-difluoromethoxybenzamide. PDE3 inhibitors which may be mentioned by way of example are SULMAZOLE, AMPIZONE, CILOSTAMIDE, CARBAZERAN, PIROXIMONE, IMAZODAN, CI-930, SIGUAZODAN, ADIBENDAN, SATERINONE, SKF-95654, SDZ-MIKS-492,349-U-85, EMORADAN, EMD-53998, EMD-57033, NSP-306, NSP-307, REVIZINONE, NM-702, WIN-62582 and WIN-63291, ENOXIMONE and MILRINONE. PDE3/4 inhibitors which may be mentioned by way of example are BENAFENTRINE, TREQUINSIN, ORG-30029, ZARDAVERINE, L-686398, SDZ-ISQ-844, ORG-20241, EMD-54622, and TOLAFENTRINE. Other PDE inhibitors include: cilomilast, pentoxifylline, roflumilast, tadalafil(Cialis®), theophylline, and vardenafil(Levitra®), zaprinast (PDE5 specific).

[0429] The peptides and agonists described herein can be used in combination therapy (for example, in order to decrease or inhibit uterine contractions) with a tocolytic agent including but not limited to beta-adrenergic agents, magnesium sulfate, prostaglandin inhibitors, and calcium channel blockers.

[0430] The peptides and agonists described herein can be used in combination therapy with an anti-neoplastic agents including but not limited to alkylating agents, epipodophyllotoxins, nitrosoureas, antimetabolites, vinca alkaloids, anthracycline antibiotics, nitrogen mustard agents, and the like. Particular anti-neoplastic agents may include tamoxifen, taxol, etoposide and 5-fluorouracil. The peptides and agonists described herein can be used in combination therapy (for example as in a chemotherapeutic composition) with an antiviral and monoclonal antibody therapies.

[0431] The peptides and agonists described herein can be used in combination therapy (for example, in prevention/treatment of congestive heart failure or another method described herein) with the partial agonist of the nociceptin receptor ORL1 described by Dooley et al. (The Journal of Pharmacology and Experimental Therapeutics, 283 (2): 735-741, 1997). The agonist is a bexapeptide having the amino acid sequence Ac-RYY (RK) (WI) (RK)-NH2 (“the Dooley peptide”), where the brackets show allowable variation of amino acid residue. Thus Dooley peptide can include but are not limited to KYYRWR, RYYRWR, KWRYYR, RYYRWK, RYYRWK (all-D amin acids), RYYRIK, RYYRIR, RYYKIK, RYYKIR, RYYKWR, RYYKWK, RYYRWR, RYYRWK, RYYRIK, RWYKWR, RYYKWK, RYYRWK and KYYRWK, wherein the amino acid residues are in the L-form unless otherwise specified. The peptides and agonists described herein can also be used in combination therapy with peptide conjugate modifications of the Dooley peptide described in WO0198324.

### Methods of Treatment

[0432] A number of disorders might be prevented or treated with GC-C receptor agonists and agents that increase cGMP levels including the peptides and agonists described herein.

[0433] The peptides and agonists described herein can be used alone or in combination therapy for the treatment or prevention of congestive heart failure. Such agents can be used in combination with natriuretic peptides (e.g., atrial natriuretic peptide, brain natriuretic peptide or C-type natriuretic peptide), a diuretic, or an inhibitor of angiotensin converting enzyme.

[0434] The peptides and agonists described herein can be used alone or in combination therapy for the treatment or prevention of benign prostatic hyperplasia (BPH). Such agents can be used in combination with one or more agents for treatment of BPH, for example, a 5-alpha reductase inhibitor (e.g., finasteride) or an alpha adrenergic inhibitor (e.g., doxazosine).

[0435] The peptides and agonists described herein can be used alone or in combination therapy for the treatment, prevention or reduction of visceral pain associated with a gastrointestinal disorder or pain associated with another disorder.

[0436] The peptides and agonists described herein can be used alone or in combination therapy for the treatment or prevention of obesity-related disorders (e.g. disorders that are associated with, caused by, or result from obesity). Examples of obesity-related disorders include overeating and bulimia, hypertension, diabetes, elevated plasma insulin concentrations and insulin resistance, dyslipidemias, hyperlipidemia, endometrial, breast, prostate and colon cancer, osteoarthritis, obstructive sleep apnea, cholelithiasis, gallstones, heart disease, abnormal heart rhythms and arrhythmias, myocardial infarction, congestive heart failure, coronary heart disease, sudden death, stroke, polycystic ovarian disease, craniopharyngioma, the Prader-Willi Syndrome, Frohlich's syndrome, GH-deficient subjects, normal variant short stature, Turner's syndrome, and other pathological conditions showing reduced metabolic activity or a decrease in resting energy expenditure as a percentage of total fat-free mass, e.g., children with acute lymphoblastic leukemia. The agents described herein may be used to reduce or control body weight (or fat) or to prevent and/or treat obesity or other appetite related disorders related to the excess consumption of food, ethanol and other appetizing substances. The agents may be used to modulate lipid metabolism, reduce body fat (e.g. via increasing fat utilization) or reduce (or suppress) appetite (e.g. via inducing satiety). Further examples of obesity-related disorders are metabolic syndrome, also known as syndrome X, insulin resistance syndrome, sexual and reproductive dysfunction, such as infertility, hypogonadism in males and hirsutism in females, gastrointestinal motility disorders, such as obesity-related gastroesophageal reflux, respiratory disorders, such as obesity-hypoventilation syndrome (Pickwickian syndrome), cardiovascular disorders, inflammation, such as systemic inflammation of the vasculature, arteriosclerosis, hypercholesterolemia, hyperuricaemia, lower back pain, gallbladder disease, gout, and kidney cancer. The agents of the present invention are also usefull for reducing the risk of secondary outcomes of obesity, such as reducing the risk of left ventricular hypertrophy.

[0437] The peptides and agonists described herein can be used alone or in combination therapy for the treatment or prevention of gastrointestinal related disorders including: chronic intestinal pseudo-obstruction (Ogilvie's syndrome), colonic pseudoobstruction, Crohn's disease, dyspepsia (including functional dyspepsia or nonulcer dyspepsia), duodenogastric reflux, functional bowel disorder, functional gastrointestinal disorders, functional heartburn, gastroesophageal reflux disease (GERD), gastrointestinal motility disorders, gastroparesis (e.g. idopathic gastroparesis), hypertrophic pyloric stenosis, Inflammatory bowel disease, irritable bowel syndrome (IBS), post-operative ileus, and ulcerative colitis. The peptides and agonists described herein can be used alone or in combination therapy to patient suffering from or susceptible to GI disorders relating to damage to the GI tract stemming from impact or surgical intervention. The peptides and agonists described herein can be used alone or in combination therapy to patients at risk for or having particular diseases associated with hypomotility (e.g. colonic inertia) or stasis in the GI tract. For example, diabetic neuropathy, anorexia nervosa, and achlorhydria are frequently accompanied by gastric hypomotility. Damage to the GI tract following surgical intervention, for instance, can result in substantial gastric stasis. The peptides and agonists described herein can be administered alone or in combination therapy to patients susceptible to or having a GI disorder associated with diabetes (e.g. diabetic gastropathy). The peptides and agonists described herein can be used alone or in combination therapy to prevent and/or treat GI disorders characterized by at least one of nausea, vomiting, heartburn, postprandial discomfort, diarrhea, constipation, indigestion or related symptoms. The peptides and agonists described herein can be used alone or in combination therapy to prevent and/or treat GI disorders associated with at least one of diabetes, anorexia nervosa, bulimia, acelorhydria, achalasia, anal fissure, haemorrhoids, irritable bowel syndrome, intestinal pseudoobstruction, scleroderma and gastrointestinal damage.

[0438] The peptides and agonists described herein can be used to prevent and/or treat constipation. Constipation can be used to describe bowel patterns which include one or more of hard, small, infrequent stools; the sensation of difficulty in passing stool, specifically excessive or ineffectual straining; the sensation of incomplete evacuation. Constipation has also been described as the passage of stool less than a certain number (e.g. 3) of times per week. A number of conditions can be associated with constipation. Constipation can be associated with numerous disorders and conditions. For example, constipation can be (1) associated with the use of a therapeutic agent (e.g. antihypertensives, anticonvulsants, antispasmodics, analgesics, anticholinergics, antidepressants, antipsychotics, cation-containing agents, anticonvulsants, ganglion blockers, vinca alkaloids); (2) associated with a muscular, neuropathic, metabolic or endocrine disorder (including but not limited to myotonic dystrophy, dermain-yositis, systemic sclerosis, sclerodoma, amyloidosis (neurologic or muscular), ischemia, tumor of the central nervous system, autonomic neuropathy, Chagas disease, cystic fibrosis, diabetes mellitus, Hirschsprung disease, hyperthyroidism, hypocalcaemia, hypothyroidism, Multiple Sclerosis, neurofibromatosis, Parkinson's disease, and spinal cord lesions (for example, related to sacral nerve damage related to trauma or a tumor or the enteric nervous system)); (3) post-surgical constipation (postoperative ileus); (4) associated with a structural colon alteration (for example that associated with Neoplasm, stricture, volvulus, anorectal, inflammation, prolapse, rectocele, or fissure); (5) associated with the a gastrointestinal disorder; (6) associated with a systemic illness or disorder (for example, electrolyte abnormalities, thyroid disease, diabetes mellitus, panhypopituitarisin, Addison's disease, pheochromocytoma, uremia, porphyria); (7) chronic constipation; (8) associated with the use of analgesic drugs (e.g. opioid induced constipation); (9) associated with megacolon; and (10) idiopathic constipation (functional constipation). Functional constipation can be associated with normal transit, slow transit (e.g. one or fewer bowel movements per week) and pelvic floor dyssynergia. Pelvic floor dyssynergia is considered a disorder of the rectum and anus although these patients also have abnormal contractions throughout the colon. Patients with pelvic floor dyssynergia have abnormal colonic pressure waves prior to defecation and present with symptoms that may include a sensation of incomplete evacuation, excessive straining, a need for digital disimpaction, perianal heaviness, and tenesmus. Constipation can be associated with bloating and abdominal pain. The peptides and agonists described herein can be used to prevent and/or treat low stool frequency or poor stool consistency.

[0439] The peptides and agonists described herein can be used to treat decreased intestinal motility, slow digestion or slow stomach emptying. The peptides and agonists can be used to relieve one or more symptoms of IBS (bloating, pain, constipation), GERD (acid reflux into the esophagus), duodenogastric reflux, functional dyspepsia, or gastroparesis (nausea, vomiting, bloating, delayed gastric emptying) and other disorders described herein. The peptides and agonists described herein can be used to treat flatulence.

[0440] The peptides and agonists described herein can be used to increase intestinal motility, slow colonic transit, and to prevent and/or treat gastrointestinal immotility and other conditions calling for laxative or stool softener therapy. Gastrointestinal immotility can include constipation, and also includes delayed oral cecal transit time, irregular Taxation, and other related gastrointestinal motility disfunction including impaction. Impaction is a condition where a large mass of dry, hard stool develops in the rectum, often due to chronic constipation. This mass may be so hard that it cannot be excreted. The subjects affected by constipation or gastrointestinal immotility can be refractory to laxative therapy and/or stool softener therapy.

[0441] The peptides and agonists described herein can be used for the treatment or prevention of cancer, pre-cancerous growths, or metastatic growths. For example, they can be used for the prevention or treatment of: colorectal/local metastasized colorectal cancer, intestinal polyps, gastrointestinal tract cancer, lung cancer, cancer or pre-cancerous growths or metastatic growths of epithelial cells, polyps, breast, colorectal, lung, ovarian, pancreatic, prostatic, renal, stomach, bladder, liver, esophageal and testicular carcinoma, carcinoma (e.g., basal cell, basosquamous, Brown-Pearce, ductal carcinoma, Ehrlich tumor, Krebs, Merkel cell, small or non-small cell lung, oat cell, papillary, bronchiolar, squamous cell, transitional cell, (Walker), leukemia (e.g., B-cell, T-cell, HTLV, acute or chronic lymphocytic, mast cell, myeloid), histiocytonia, histiocytosis, Hodgkin's disease, non-Hodgkin's lymphoma, plasmacytoma, reticuloendotheliosis, adenoma, adeno-carcinoma, adenofibroma, adenolymphoma, arneloblastoma, angiokeratoma, angiolymphoid hyperplasia with eosinophilia, sclerosing angioma, angiomatosis, apudoma, branchionia, malignant carcinoid syndrome, carcinoid heart disease, carcinosarcoma, cementoina, cholangioma, cholesteatoma, chondrosarcoma, chondroblastoma, chondrosarcoma, chordoma, choristoma, craniopharyngioma, chrondrorna, cylindroma, cystadenocarcinoma, cystadenoma, cystosarconia phyllodes, dysgenninoma, ependymoma, Ewing sarcoma, fibroma, fibrosarcoma, giant cell tumor, ganglioneuroma, glioblastoma, glomangioma, granulosa cell tumor, gynandroblastoma, hamartoma, hemangioendothelioma, hemangioma, hemangio-pericytoma, hemangiosarcoma, hepatorna, islet cell tumor, Kaposi sarcoma, leiomyoma, leiomyosarcoma, leukosarcoma, Leydig cell tumor, lipoma, liposarcoma, lymphaugioma, lymphangiomyoma, lymphangiosarcoma, medulloblastoma, meningioma, mesenchymoma, mesonephroma, mesothelioma, inyoblastoma, myoma, myosarcoma, myxoma, myxosarcoma, neurilemmoma, neuroma, neuroblastoma, neuroepithelioma, neurofibroma, neurofibromatosis, odontoma, osteoma, osteosarcoma, papilloma, paraganglioma, paraganglionia nonchromaffin, pinealoma, rhabdomyoma, rhabdomyosarcoma, Sertoli cell tumor, teratoma, theca cell tumor, and other diseases in which cells have become dysplastic, immortalized, or transformed.

[0442] The peptides and agonists described herein can be used for the treatment or prevention of: Familial Adenomatous Polyposis (FAP) (autosomal dominant syndrome) that precedes colon cancer, hereditary nonpolyposis colorectal cancer (HNPCC), and inherited autosomal dominant syndrome.

[0443] For treatment or prevention of cancer, pre-cancerous growths and metastatic growths, the peptides and agonists described herein can be used in combination therapy with radiation or chemotherapeutic agents, an inhibitor of a cGMP-dependent phosphodiesterase or a selective cyclooxygenase-2 inhibitor. A number of selective cyclooxygenase-2 inhibitors are described in US20010024664, U.S. Pat. No. 5,380,738, U.S. Pat. No. 5,344,991, U.S. Pat. No. 5,393,790, U.S. Pat. No. 5,434,178, U.S. Pat. No. 5,474,995, U.S. Pat. No. 5,510,368, WO02/062369, WO 96/06840, WO 96/03388, WO 96/03387, WO 96/19469, WO 96/25405, WO 95/15316, WO 94/15932, WO 94/27980, WO 95/00501, WO 94/13635, WO 94/20480, and WO 94/26731, the disclosures of which are herein incorporated by reference. [Pyrazol-1-yl]benzenesulfonamides have also been described as inhibitors of cyclooxygenase-2.

[0444] The peptides and agonists described herein can be used in the treatment or prevention of inflammation. Thus, they can be used alone or in combination with an inhibitor of cGMP-dependent phosphodiesterase or a selective cyclooxygenase-2 inhibitor for treatment of: organ inflammation, IBD (e.g, Crohn's disease, ulcerative colitis), asthma, nephritis, hepatitis, pancreatitis, bronchitis, cystic fibrosis, ischemic bowel diseases, intestinal inflanrnations/allergies, coeliac disease, proctitis, eosinophilic gastroenteritis, mastocytosis, and other inflammatory disorders. The peptides and agonists described herein can be used alone or in combination therapy in the treatment or prevention of gastrointestinal tract inflammation (e.g. inflammation associated with a gastrointestinal, disorder, gastrointestinal tract infection, or another disorder), They can be used alone or in combination therapy with phenoxyalkycarboxylic acid derivatives for the treatment of interstitial cystitis, irritable bowel syndrome, ulcerative colitis, and other inflammatory conditions, as mentioned in US20050239902A1.

[0445] The peptides and agonists described herein can also be used to treat or prevent insulin-related disorders, for example: II diabetes mellitus, hyperglycemia, obesity, disorders associated with disturbances in glucose or electrolyte transport and insulin secretion in cells, or endocrine disorders. They can be also used in insulin resistance treatment and post-surgical and non-post surgery decrease in insulin responsiveness.

[0446] The peptides and agonists described herein can be used to prevent and/or treat pulmonary and respiratory related disorders, including, inhalation, ventilation and mucus secretion disorders, pulmonary hypertension, chronic obstruction of vessels and airways, acute respiratory failure, and irreversible obstructions of vessels and bronchi. One may administer an agent described herein for treating bronchospasm, for inducing bronchodilation, for treating chronic obstructive pulmonary disease (including chronic bronchitis with normal airflow), for treating asthma (including bronchial asthma, intrinsic asthma, extrinsic asthma, acute asthma, chronic or inveterate asthma (e.g. late asthma and airways hyper-responsiveness), dust-induced asthma, allergen-induced asthma, viral-induced asthma, cold-induced asthma, pollution-induced asthma and exercise-induced asthma) and for treating rhinitis (including acute-, allergic, hatrophic rhinitis or chronic rhinitis (such as rhinitis caseosa, hypertrophic rhinitis, rhinitis purulenta, rhinitis sicca), rhinitis medicamentosa, membranous rhinitis (including croupous, fibrinous and pseudomembranous rhinitis), scrofulous rhinitis, perennial allergic rhinitis, seasonal rhinitis (including rhinitis nervosa (hay fever) and vasomotor rhinitis). The peptides described herein may also be useful in the treatment of dry eye disease and chronic sinusitis. The peptides described herein may also be used to prevent and/or treat disorders characterized by acute pulmonary vasoconstriction such as may result from pneumonia, traumatic injury, aspiration or inhalation injury, fat embolism in the lung, acidosis inflammation of the lung, adult respiratory distress syndrome, acute pulmonary edema, acute mountain sickness, post-cardiac surgery, acute pulmonary hypertension, persistent pulmonary hypertension of the newbom, perinatal aspiration syndrome, hyaline membrane disease, acute pulmonary thromboembolism, herapin-protamine reactions, sepsis, status asthmaticus or hypoxia (including iatrogenic hypoxia) and other forms of reversible pulmonary vasoconstriction. Such pulmonary disorders also are also characterized by inflammation of the lung including those associated with the migration into the lung of nonresident cell types including the various leucocyte subclasses. Also included in the respiratory disorders contemplated are: bullous disease, cough, chronic cough associated with inflammation or iatrogenic induced, airway constriction, pigeon fancier's disease, eosinophilic bronchitis, asthmatic bronchitis, chronic bronchitis with airway obstruction (chronic obstructive bronchitis), eosinophilic lung disease, emphysema, farmer's lung, allergic eye diseases (including allergic conjunctivitis, vernal conjunctivitis, vernal keratoconjunctivitis, and giant papillary conjunctivitis), idiopathic pulmonary fibrosis, cystic fibrosis, diffuse pan bronchiolitis and other diseases which are characterized by inflammation of the lung and/or excess mucosal secretion. Other physiological events which are contemplated to be prevented, treated or controlled include platelet activation in the lung, chronic inflammatory diseases of the lung which result in interstitial fibrosis, such as interstitial lung diseases (ILD) (e.g., idiopathic pulmonary fibrosis, or ILD associated with rheumatoid arthritis, or other autoimmune conditions), chronic obstructive pulmonary disease (COPD)(such as irreversible COPD), chronic sinusitis, fibroid lung, hypersensitivity lung diseases, hypersensitivity pneumonitis, idiopathic interstitial pneumonia, nasal congestion, nasal polyposis, and otitis media.

[0447] The peptides and agonists described herein can be used alone or in combitherapy to prevent or treat: retinopathy, nephropathy, diabetic angiopathy, and edema formation

[0448] The peptides and agonists described herein can be used alone or in combitherapy to prevent or treat neurological disorders, for example, headache, tension-type headache, migraines, anxiety, stress, cognitive disorders, cerebral ischemia, brain trauma, movement disorders, aggression, psychosis, seizures, panic attacks, hysteria, sleep disorders, depression, schizoaffective disorders, sleep apnea, attention deficit syndromes, memory loss, dementia, memory and learning disorders as discussed in Moncada and Higgs 1995 FASEB J. 9:1319-1330; Severina 1998 Biochemistry 63:794; Lee et al. 2000 PNAS 97: 10763-10768; Hobbs 1997 TIPS18:484-491; Murad 1994 Adv. Pharmacol. 26:1-335; and Denninger et al. 1999 Biochim. Biophys. Acta 1411:334-350 and narcolepsy. They may also be used as a sedative.

[0449] The peptides and detectably peptides and agonists described herein can be used as markers to identify, detect, stage, or diagnosis diseases and conditions of small intestine, including, without limitation: Crohn's disease, colitis, inflammatory bowel disease, tumors, benign tumors, such as benign stromal tumors, adenoma, angioma, adenomatous (pedunculated and sessile) polyps, malignant, carcinoid tumors, endocrine cell tumors, lymphoma, adenocarcinoma, foregut, midgut, and hindgut carcinoma, gastroinstestinal stromal tumor (GIST), such as leiomyoma, cellular leiomyoma, leiomyoblastoma, and leiomyosarcoma, gastrointestinal autonomic nerve tumor, malabsorption syndromes, celiac diseases, diverticulosis, Meckel's diverticulum, colonic diverticula, megacolon, Hirschsprung's disease, irritable bowel syndrome, mesenteric ischemia, ischemic colitis, colorectal cancer, colonic polyposis, polyp syndrome, intestinal adenocarcinoma, Liddle syndrome, Brody myopathy, infantile convulsions, and choreoathetosis

[0450] The peptides and agonists described herein can be conjugated to another molecule (e.g., a diagnostic or therapeutic molecule) to target cells bearing the GC-C receptor, e.g., cystic fibrosis lesions and specific cells lining the intestinal tract. Thus, they can be used to target radioactive moieties or therapeutic moieties (active moieties like a radionuclide, an enzyme, a fluorescent label, a metal chelating group, a chemiluminescent label, a bioluminescent label, a chemotherapeutic, a toxin, an inactive prodrug, a radiosensitizing agent, a photodynamic agent) to the intestine to aid in imaging and diagnosing or treating colorectal/metastasized or local colorectal cancer. In addition, they can be used to deliver antisense molecules or nucleic acid molecules (like normal copies of the p53 tumor suppressor gene) to the intestinal tract. The peptides and agonists described herein can also be used to increase the number of GC-C molecules on the surface of a cell. In some embodiments the cell is a metastasized colorectal cancer cell. In one embodiment the peptide or agonist described herein is therapeutically conjugated to a second agent. In certain embodiments, the second agent can be radioactive or radiostable. In certain embodiments the second agent can be selected from the group consisting of a compound that causes cell death, a compound that inhibits cell division, a compound that induces cell differentiation, a chemotherapeutic, a toxin and a radiosensitizing agent. In certain embodiments the second agent can be selected from the group consisting of: methotrexate, doxorubicin, daunorubicin, cytosinarabinoside, etoposide, 5-4 fluorouracil, melphalan, chlorambucil, cis-platin, vindesine, mitomycin, bleomycin, purothionin, macromomycin, 1,4-benzoquinone derivatives, trenimon, ricin, ricin A chain, Pseudomonas exotoxin, diphtheria toxin, Clostidium perfringens phospholipase C, bovine pancreatic ribonuclease, pokeweed antiviral protein, abrin, abrin A chain, cobra venom factor, gelonin, saporin, modeccin, viscumin, volkensin, nitroimidazole, metronidazole and misonidazole. In certain embodiments the second agent can be a cytoxic agent selected from the group consisting of cemadotin, a derivative of cemadotin, a derivative of he miasterlin, esperamicin C, neocarzinostatin, maytansinoid DM1, 7-chloromethyl-10,11 methylenedioxy-camptothecin, rhizoxin, and the halichondrin B analog, ER-086526.

[0451] The peptides and agonists described herein can be used alone or in combination therapy to prevent and/or treat inner ear disorders, e.g., to prevent and/or treat Meniere's disease (including symptoms thereof such as vertigo, hearing loss, tinnitus, sensation of fullness in the ear), Mal de débarquement syndrome, otitis externa, otitis media, otorrhea, acute mastoiditis, otosclerosis, otic pain; otic bleeding, otic inflammation, Lermoyez's syndrome, vestibular neuronitis, benign paroxysmal positional vertigo (BPPV), herpes zoster oticus, Ramsay Hunt's syndrome, herpes, labyrinthitis, purulent labyrinthitis, perilymph fistulas, presbycusis, ototoxicity (including drug-induced ototoxicity), neuromias (including acoustic neuromas), aerotitis media, infectious myringitis, bullous myringitis, squamous cell carcinoma, basal cell carcinoma, pre-cancerous otic conditions, nonchromaffin paragangliomas, chemodectomas, glomus jugulare tumors, glomus tympanicum tumors, perichondritis, aural eczematoid dermatitis, malignant external otitis, subperichondrial hematoma, ceruminomas, impacted cerumen, sebaceous cysts, osteomas, keloids, otalgia, tinnitus, tympanic membrane infection, tympanitis, otic furuncles, petrositis, conductive and sensorineural hearing loss, epidural abscess, lateral sinus thrombosis, subdural empyema, otitic hydrocephalus, Dandy's syndrome, bullous myringitis, diff-use external otitis, foreign bodies, keratosis obturans, otic neoplasm, otomycosis, trauma, acute barotitis media, acute eustachian tube obstruction, postsurgical otalgia, cholesteatoma, infections related to an otic surgical procedure, and complications associated with any of said disorders. The peptides and agonists described herein can be used alone or in combination therapy to maintain fluid homeostasis in the inner ear neuronitis (including viral neuronitis), ganglionitis, geniculate

[0452] The peptides and agonists described herein can be used alone or in combination therapy to prevent and/or treat disorders associated with fluid and sodium retention, e.g., diseases of the electrolyte-water/electrolyte transport system within the kidney, gut and urogenital system, congestive heart failure, hypertension, hypotension, salt dependent forms of high blood pressure, hepatic edema, and liver cirrhosis. In addition they can be used to facilitate diuresis or control intestinal fluid. The peptides and agonists described herein can also be used to treat disorders where there is abnormal proliferation of epithelial cells within the kidney (e.g. as in the case of renal cancer).

[0453] The peptides and agonists described herein can be used alone or in combination therapy to prevent and/or treat kidney disease. “Kidney disease” includes renal failure (including acute renal failure), renal insufficiency, nephrotic edema, glomerulonephritis, pyelonephritis, kidney failure, chronic renal failure, nephritis, nephrosis, azotemia, uremia, immune renal disease, acute nephritic syndrome, rapidly progressive nephritic syndrome, nephrotic syndrome, Berger's Disease, chronic nephritic/proteinuric syndrome, tubulointerstital disease, nephrotoxic disorders, renal infarction, atheroembolic renal disease, renal cortical necrosis, malignant nephroangiosclerosis, renal vein thrombosis, renal tubular acidosis, renal glucosuria, nephrogenic diabetes insipidus, Bartter's Syndrome, Liddle's Syndrome, polycystic kidney disease, medullary cystic disease, medullary sponge kidney, hereditary nephritis, and nail-patella syndrome, along with any disease or disorder that relates to the renal system and related disorders, as well as symptoms indicative of, or related to, renal or kidney disease and related disorders.

[0454] The peptides and agonists described herein can be used alone or in combination therapy to prevent or treat polycystic kidney disease. Polycystic kidney disease” “PKD” (also called “polycystic renal disease”) refers to a group of disorders characterized by a large number of cysts distributed throughout dramatically enlarged kidneys. The resultant cyst development leads to impairment of kidney function and can eventually cause kidney failure. “PKD” specifically includes autosomal dominant polycystic kidney disease (ADPKD) and recessive autosomal recessive polycystic kidney disease (ARPKD), in all stages of development, regardless of the underlying cause.

[0455] The peptides and agonists described herein can be used alone or in combination therapy to prevent and/or treat disorders associated with bicarbonate secretion, e.g., Cystic Fibrosis.

[0456] The peptides and agonists described herein can be used alone or in combination therapy to prevent and/or treat disorders associated with bile secretion. In addition, they can be used to facilitate or control chloride and bile fluid secretion in the gall bladder.

[0457] The peptides and agonists described herein can be used alone or in combination therapy to prevent and/or treat disorders associated with liver cell regeneration. This may include administration of the peptides and agonists to liver transplant recipients and to patients with drug or alcohol induced-liver damage. Furthermore, the peptides and agonists may be useful to treat liver damage as in the case of viral mediated hepatitis. The peptides and agonists described herein may be used alone or in combination to prevent and/or treat liver abscess, liver cancer (either primary or metastatic), cirrhosis (such as cirrhosis caused by the alcohol consumption or primary biliary cirrhosis), amebic liver abscess, autoimmune hepatitis, biliary atresia, coccidioidomycosis disseminated, δ agent (hepatitis δ), hemochromatosis, hepatitis a, hepatitis b, hepatitis c, or any other acute, subacute, fulminant or chronic hepatitis of viral, metabolic or toxic etiology, hepatocellular carcinoma, pyogenic liver abscess, Reye's syndrome, sclerosing cholangitis, Wilson's disease, drug induced hepatotoxicity, or fulmninant or acute liver failure. The peptides and agonists may be used in stimulating hepatic regeneration after surgical hepatectomy.

[0458] The peptides and agonists described herein can be used alone or in combination therapy to prevent and/or treat myocardial infraction, coronary artery disease, nitrate-induced tolerance, nitrate tolerance, diastolic dysfunction, angina pectoris, stable, unstable and variant (Prinzmetal) angina, atherosclerosis, thrombosis, endothelial dysfunction, cardiac edema, stroke, conditions of reduced blood vessel patency, e.g., postpercutaneous transluminal coronary angioplasty (post-PTCA), and peripheral vascular disease.

[0459] The peptides and agonists described herein can be used alone or in combination therapy to prevent and/or treat glaucoma.

[0460] The peptides and agonists described herein can be used alone or in combination therapy to prevent and/or treat immunodeficiency.

[0461] The peptides and agonists described herein can be used alone or in combination therapy to prevent and/or treat bladder outlet obstruction and incontinence.

[0462] The peptides and agonists described herein can be used alone or in combination therapy to prevent and/or treat male (e.g. erectile dysfunction) or female sexual dysftimction, dysmenorrhea, endometriosis, polycystic ovary syndrome, vaginal dryness, uterine pain, or pelvic pain. These peptides and agonists described herein can be utilized as tocolytic agents that decrease or arrest uterine contractions. The peptides and agonists described herein can be used to prevent/treat premature/preterm labor. Premature or preterm labor can be associated with, for example, an illness/disorder/condition of the mother (such as pre-eclampsia, high blood pressure or diabetes, abnormal shape or size of the uterus, weak or short cervix, hormone imbalance, vaginal infection that spreads to the uterus, abnormalities of the placenta, such as placenta previa, and excessive amniotic fluid), premature rupture of the amniotic membranes (“water breaks”), large fetus, and more than one fetus. The peptides or agonists described herein can be used to prevent uterine rupture. The peptides or agonists described herein can be used treat rapid uterine contractions (for example, associated with placental abruption wherein the placental abruption is associated with hypertension, diabetes, a multiply pregnancy, an unusually large amount of amniotic fluid, numerous previous deliveries, or advanced maternal age (e.g. >40 years old). In certain embodiments they can be used in combination with a phosphodiesterase inhibitor. The peptides and agonists described herein can be used alone or in combination therapy to prevent and/or treat infertility, for example, male infertility due to poor sperm quality, decreased sperm motility or low sperm count.

[0463] The peptides and agonists described herein can be used alone or in combination therapy to prevent and/or treat osteopenia disorders (bone loss disorders). “Bone loss disorders” include conditions and diseases wherein the inhibition of bone loss and/or the promotion of bone formation is desirable. Among such conditions and diseases are osteoporosis, osteomyelitis, Paget's disease (osteitis deformans), periodontitis, hypercalcemia, osteonecrosis, osteosdrcoma, osteolyic metastases, familial expansile osteolysis, prosthetic loosening, periprostetic osteolysis, bone loss attendant rheumatoid arthritis, and cleiodocranial dysplasia (CCD). Osteoporosis includes primary osteoporosis, endocrine osteoporosis (hyperthyroidism, hyperparathyroidism, Cushing's syndrome, and acromegaly), hereditary and congenital forms of osteoporosis (osteogenesis imperfecta, homocystinuria, Menkes' syndrome, and Rile-Day syndrome) and osteoporosis due to immobilization of extremitiesosteomyelitis, or an infectious lesion in bone leading to bone loss. The peptides and agonists can be used alone or in combination therapy to stimulating bone regeneration. The bone regeneration may be following reconstruction of bone defects in cranio-maxillofacial surgery, or following an implant into bone, for example a dental implant, bone supporting implant, or prosthesis. The bone regeneration may also be following a bone fracture.

[0464] The peptides and agonists described herein may be used alone or in combination therapy (for example, with other agents that increase cGMP) to prevent or treat disorders related to an alteration in cGMP including, but not limited to Alzheimer's disease, psoriasis, skin necrosis, scarring, fibrosis, baldness, Kawasaki's Disease, nutcracker oesophagus (US20050245544), septic shock, NSAID-induced gastric disease or disorder, ischemic renal disease or disorder, peptic ulcer, sickle cell anemia, epilepsy, and a neuroinflammatory disease or disorder (for example as described in WO05105765).

[0465] The peptides described herein can be used as immunogens to create antibodies for immunoassays. The peptides described herein that have homology to ST peptides can be used as immunogens to treat and/or prevent one or more disease symptoms associated with traveler's diarrhea and for vaccination against pathogens, including but not limited to enterotoxigenic E. coli (ETEC). They may also be used in vaccines which also comprise interleukin 18 and either saponin adjuvant or CpG adjuvant for example as described in WO05039634 and WO05039630. The methods described in US20040146534, U.S. Pat. No. 4,220,584, U.S. Pat. No. 4,285,391, U.S. Pat. No. 5,182,109, U.S. Pat. No. 4,603,049, U.S. Pat. No. 4,545,931, U.S. Pat. No. 4,886,663, U.S. Pat. No. 4,758,655, WO08402700, FR2525592, and FR2532850 can be similarly used to create immunogens comprising the peptides described herein. U.S. Pat. No. 6,043,057, U.S. Pat. No. 5,834,246, U.S. Pat. No. 5,268,276, and EP368819, specifically describe an expression system containing CTB (cholera toxin Beta subunit) fused to an ST-like peptide under a foreign promoter for use as a vaccine. The nucleic acids that encode the peptides described herein may be use as genetic vaccines as described in US20050260605 and WO0148018. The nucleic acid molecules may also be used for the manufacture of a functional ribonucleic acid, wherein the functional ribonucleic acid is selected from the group comprising ribozymes, antisense nucleic acids and siRNA (as described in WO05103073).

The application's sequence listing, which the Patent Office published only in electronic form, follows.

SEQUENCE LISTING (14303 sequences)

SEQ ID NO: 1 - protein, 21 aa, Artificial Sequence
  Synthetically generated peptide
  VARIANT (8)..(9): Xaa = any amino acid
  misc_feature (12)..(14): Xaa can be any naturally occurring amino acid
  misc_feature (16)..(17): Xaa can be any naturally occurring amino acid
  misc_feature (19)..(21): Xaa can be any naturally occurring amino acid
NSSNYCCXXCCXXXCXXCXXX

SEQ ID NO: 2 - protein, 21 aa, Artificial Sequence
  Synthetically generated peptide
  VARIANT (9)..(9): Xaa = any amino acid; or Xaa = any amino acid other than Leu; or Xaa = Phe, Trp, and Tyr; or selected from from any other natural or non-natural aromatic amino acid; or Xaa = Tyr
  VARIANT (20)..(21): Xaa 20 = Asp, Xaa21 = Phe
NSSNYCCEXCCNPACTGCYXX

SEQ ID NO: 3 - protein, 14 aa, Artificial Sequence
  Synthetically generated peptide
CCEYCCNPACTGCY

SEQ ID NO: 4 - protein, 19 aa, Artificial Sequence
  Synthetically generated peptide
NSSNYCCELCCNPACTGCY

SEQ ID NO: 5 - protein, 19 aa, Artificial Sequence
  Synthetically generated peptide
NSSNYCCEYCCNPACTGCY

SEQ ID NO: 6 - protein, 13 aa, Artificial Sequence
  Synthetically generated peptide
CCEYCCNPACTGC

SEQ ID NO: 7 - protein, 18 aa, Escherichia coli
NTFYCCELCCNPACAGCY

SEQ ID NO: 8 - protein, 14 aa, Artificial Sequence
  Synthetically generated peptide
CCELCCNPACTGCY

SEQ ID NO: 9 - protein, 15 aa, Artificial Sequence
  Synthetically generated peptide
NCCELCCNPACTGCY

SEQ ID NO: 10 - protein, 15 aa, Artificial Sequence
  Synthetically generated peptide
NCCELCCNPACWGCY

SEQ ID NO: 11 - protein, 15 aa, Artificial Sequence
  Synthetically generated peptide
NCCEFCCNPACTGCY

SEQ ID NO: 12 - protein, 15 aa, Artificial Sequence
  Synthetically generated peptide
NCCEYCCNPACTGCY

SEQ ID NO: 13 - protein, 15 aa, Artificial Sequence
  Synthetically generated peptide
NCCEWCCNPACTGCY

SEQ ID NO: 14 - protein, 15 aa, Artificial Sequence
  Synthetically generated peptide
NCCERCCNPACTGCY

SEQ ID NO: 15 - protein, 15 aa, Artificial Sequence
  Synthetically generated peptide
NCCEKCCNPACTGCY

SEQ ID NO: 16 - protein, 21 aa, Artificial Sequence
  Synthetically generated peptide
NSSNYCCELCCNPACTGCYDF

SEQ ID NO: 17 - protein, 21 aa, Artificial Sequence
  Synthetically generated peptide
NSSNYCCELCCNPACWGCYDF

SEQ ID NO: 18 - protein, 21 aa, Artificial Sequence
  Synthetically generated peptide
NSSNYCCEFCCNPACTGCYDF

SEQ ID NO: 19 - protein, 21 aa, Artificial Sequence
  Synthetically generated peptide
NSSNYCCEYCCNPACTGCYDF

SEQ ID NO: 20 - protein, 21 aa, Artificial Sequence
  Synthetically generated peptide
NSSNYCCEWCCNPACTGCYDF

SEQ ID NO: 21 - protein, 21 aa, Artificial Sequence
  Synthetically generated peptide
NSSNYCCERCCNPACTGCYDF

SEQ ID NO: 22 - protein, 21 aa, Artificial Sequence
  Synthetically generated peptide
NSSNYCCEKCCNPACTGCYDF

SEQ ID NO: 23 - protein, 16 aa, Artificial Sequence
  Synthetically generated peptide
CCELCCNPACTGCYDF

SEQ ID NO: 24 - protein, 16 aa, Artificial Sequence
  Synthetically generated peptide
CCELCCNPACWGCYDF

SEQ ID NO: 25 - protein, 16 aa, Artificial Sequence
  Synthetically generated peptide
CCEFCCNPACTGCYDF

SEQ ID NO: 26 - protein, 16 aa, Artificial Sequence
  Synthetically generated peptide
CCEYCCNPACTGCYDF

SEQ ID NO: 27 - protein, 16 aa, Artificial Sequence
  Synthetically generated peptide
CCEWCCNPACTGCYDF

SEQ ID NO: 28 - protein, 16 aa, Artificial Sequence
  Synthetically generated peptide
CCERCCNPACTGCYDF

SEQ ID NO: 29 - protein, 16 aa, Artificial Sequence
  Synthetically generated peptide
CCEKCCNPACTGCYDF

SEQ ID NO: 30 - protein, 17 aa, Artificial Sequence
  Synthetically generated peptide
NCCELCCNPACTGCYDF

SEQ ID NO: 31 - protein, 17 aa, Artificial Sequence
  Synthetically generated peptide
NCCELCCNPACWGCYDF

SEQ ID NO: 32 - protein, 17 aa, Artificial Sequence
  Synthetically generated peptide
NCCEFCCNPACTGCYDF

SEQ ID NO: 33 - protein, 17 aa, Artificial Sequence
  Synthetically generated peptide
NCCEYCCNPACTGCYDF

SEQ ID NO: 34 - protein, 17 aa, Artificial Sequence
  Synthetically generated peptide
NCCEWCCNPACTGCYDF

SEQ ID NO: 35 - protein, 17 aa, Artificial Sequence
  Synthetically generated peptide
NCCERCCNPACTGCYDF

SEQ ID NO: 36 - protein, 17 aa, Artificial Sequence
  Synthetically generated peptide
NCCEKCCNPACTGCYDF

SEQ ID NO: 37 - protein, 19 aa, Artificial Sequence
  Synthetically generated peptide
QSSNYCCEYCCNPACTGCY

SEQ ID NO: 38 - protein, 19 aa, Artificial Sequence
  Synthetically generated peptide
NTSNYCCEYCCNPACTGCY

SEQ ID NO: 39 - protein, 19 aa, Artificial Sequence
  Synthetically generated peptide
NLSNYCCEYCCNPACTGCY

SEQ ID NO: 40 - protein, 19 aa, Artificial Sequence
  Synthetically generated peptide
NISNYCCEYCCNPACTGCY

SEQ ID NO: 41 - protein, 19 aa, Artificial Sequence
  Synthetically generated peptide
NSSQYCCEYCCNPACTGCY

SEQ ID NO: 42 - protein, 18 aa, Artificial Sequence
  Synthetically generated peptide
SSNYCCEYCCNPACTGCY

SEQ ID NO: 43 - protein, 19 aa, Artificial Sequence
  Synthetically generated peptide
QSSQYCCEYCCNPACTGCY

SEQ ID NO: 44 - protein, 18 aa, Artificial Sequence
  Synthetically generated peptide
SSQYCCEYCCNPACTGCY

SEQ ID NO: 45 - protein, 19 aa, Artificial Sequence
  Synthetically generated peptide
NSSNYCCEACCNPACTGCY

SEQ ID NO: 46 - protein, 19 aa, Artificial Sequence
  Synthetically generated peptide
NSSNYCCERCCNPACTGCY

SEQ ID NO: 47 - protein, 19 aa, Artificial Sequence
  Synthetically generated peptide
NSSNYCCENCCNPACTGCY

SEQ ID NO: 48 - protein, 19 aa, Artificial Sequence
  Synthetically generated peptide
NSSNYCCEDCCNPACTGCY

SEQ ID NO: 49 - protein, 19 aa, Artificial Sequence
  Synthetically generated peptide
NSSNYCCECCCNPACTGCY

SEQ ID NO: 50 - protein, 19 aa, Artificial Sequence
  Synthetically generated peptide
NSSNYCCEQCCNPACTGCY

SEQ ID NO: 51 - protein, 19 aa, Artificial Sequence
  Synthetically generated peptide
NSSNYCCEECCNPACTGCY

SEQ ID NO: 52 - protein, 19 aa, Artificial Sequence
  Synthetically generated peptide
NSSNYCCEGCCNPACTGCY

SEQ ID NO: 53 - protein, 19 aa, Artificial Sequence
  Synthetically generated peptide
NSSNYCCEHCCNPACTGCY

SEQ ID NO: 54 - protein, 19 aa, Artificial Sequence
  Synthetically generated peptide
NSSNYCCEICCNPACTGCY

SEQ ID NO: 55 - protein, 19 aa, Artificial Sequence
  Synthetically generated peptide
NSSNYCCEKCCNPACTGCY

SEQ ID NO: 56 - protein, 19 aa, Artificial Sequence
  Synthetically generated peptide
NSSNYCCEMCCNPACTGCY

SEQ ID NO: 57 - protein, 19 aa, Artificial Sequence
  Synthetically generated peptide
NSSNYCCEFCCNPACTGCY

SEQ ID NO: 58 - protein, 19 aa, Artificial Sequence
  Synthetically generated peptide
NSSNYCCEPCCNPACTGCY

SEQ ID NO: 59 - protein, 19 aa, Artificial Sequence
  Synthetically generated peptide
NSSNYCCESCCNPACTGCY

SEQ ID NO: 60 - protein, 19 aa, Artificial Sequence
  Synthetically generated peptide
NSSNYCCETCCNPACTGCY

SEQ ID NO: 61 - protein, 19 aa, Artificial Sequence
  Synthetically generated peptide
NSSNYCCEWCCNPACTGCY

SEQ ID NO: 62 - protein, 19 aa, Artificial Sequence
  Synthetically generated peptide
NSSNYCCEVCCNPACTGCY

SEQ ID NO: 63 - protein, 14 aa, Artificial Sequence
  Synthetically generated peptide
CCEACCNPACTGCY

SEQ ID NO: 64 - protein, 14 aa, Artificial Sequence
  Synthetically generated peptide
CCERCCNPACTGCY

SEQ ID NO: 65 - protein, 14 aa, Artificial Sequence
  Synthetically generated peptide
CCENCCNPACTGCY

SEQ ID NO: 66 - protein, 14 aa, Artificial Sequence
  Synthetically generated peptide
CCEDCCNPACTGCY

SEQ ID NO: 67 - protein, 14 aa, Artificial Sequence
  Synthetically generated peptide
CCECCCNPACTGCY

SEQ ID NO: 68 - protein, 14 aa, Artificial Sequence
  Synthetically generated peptide
CCEQCCNPACTGCY

SEQ ID NO: 69 - protein, 14 aa, Artificial Sequence
  Synthetically generated peptide
CCEECCNPACTGCY

SEQ ID NO: 70 - protein, 14 aa, Artificial Sequence
  Synthetically generated peptide
CCEGCCNPACTGCY

SEQ ID NO: 71 - protein, 14 aa, Artificial Sequence
  Synthetically generated peptide
CCEHCCNPACTGCY

SEQ ID NO: 72 - protein, 14 aa, Artificial Sequence
  Synthetically generated peptide
CCEICCNPACTGCY

SEQ ID NO: 73 - protein, 14 aa, Artificial Sequence
  Synthetically generated peptide
CCEKCCNPACTGCY

SEQ ID NO: 74 - protein, 14 aa, Artificial Sequence
  Synthetically generated peptide
CCEMCCNPACTGCY

SEQ ID NO: 75 - protein, 14 aa, Artificial Sequence
  Synthetically generated peptide
CCEFCCNPACTGCY

SEQ ID NO: 76 - protein, 14 aa, Artificial Sequence
  Synthetically generated peptide
CCEPCCNPACTGCY

SEQ ID NO: 77 - protein, 14 aa, Artificial Sequence
  Synthetically generated peptide
CCESCCNPACTGCY

SEQ ID NO: 78 - protein, 14 aa, Artificial Sequence
  Synthetically generated peptide
CCETCCNPACTGCY

SEQ ID NO: 79 - protein, 14 aa, Artificial Sequence
  Synthetically generated peptide
CCEWCCNPACTGCY

SEQ ID NO: 80 - protein, 14 aa, Artificial Sequence
  Synthetically generated peptide
CCEVCCNPACTGCY

SEQ ID NO: 81 - protein, 14 aa, Artificial Sequence
  Synthetically generated peptide
CCELCCNPACWGCY

SEQ ID NO: 82 - protein, 13 aa, Artificial Sequence
  Synthetically generated peptide
CCEACCNPACTGC

SEQ ID NO: 83 - protein, 13 aa, Artificial Sequence
  Synthetically generated peptide
CCERCCNPACTGC

SEQ ID NO: 84 - protein, 13 aa, Artificial Sequence
  Synthetically generated peptide
CCENCCNPACTGC

SEQ ID NO: 85 - protein, 13 aa, Artificial Sequence
  Synthetically generated peptide
CCEDCCNPACTGC

SEQ ID NO: 86 - protein, 13 aa, Artificial Sequence
  Synthetically generated peptide
CCECCCNPACTGC

SEQ ID NO: 87 - protein, 13 aa, Artificial Sequence
  Synthetically generated peptide
CCEQCCNPACTGC

SEQ ID NO: 88 - protein, 13 aa, Artificial Sequence
  Synthetically generated peptide
CCEECCNPACTGC

SEQ ID NO: 89 - protein, 13 aa, Artificial Sequence
  Synthetically generated peptide
CCEGCCNPACTGC

SEQ ID NO: 90 - protein, 13 aa, Artificial Sequence
  Synthetically generated peptide
CCEHCCNPACTGC

SEQ ID NO: 91 - protein, 13 aa, Artificial Sequence
  Synthetically generated peptide
CCEICCNPACTGC

SEQ ID NO: 92 - protein, 13 aa, Artificial Sequence
  Synthetically generated peptide
CCEKCCNPACTGC

SEQ ID NO: 93 - protein, 13 aa, Artificial Sequence
  Synthetically generated peptide
CCEMCCNPACTGC

SEQ ID NO: 94 - protein, 13 aa, Artificial Sequence
  Synthetically generated peptide
CCEFCCNPACTGC

SEQ ID NO: 95 - protein, 13 aa, Artificial Sequence
  Synthetically generated peptide
CCEPCCNPACTGC

SEQ ID NO: 96 - protein, 13 aa, Artificial Sequence
  Synthetically generated peptide
CCESCCNPACTGC

SEQ ID NO: 97 - protein, 13 aa, Artificial Sequence
  Synthetically generated peptide
CCETCCNPACTGC

SEQ ID NO: 98 - protein, 13 aa, Artificial Sequence
  Synthetically generated peptide
CCEWCCNPACTGC

SEQ ID NO: 99 - protein, 13 aa, Artificial Sequence
  Synthetically generated peptide
CCEVCCNPACTGC

SEQ ID NO: 100 - protein, 19 aa, Escherichia coli
NSSNYCCELCCNPACTGCY

SEQ ID NO: 101 - protein, 19 aa, Artificial Sequence
  Synthetically generated peptide
NSSNYCCELCCNPACWGCY

SEQ ID NO: 102 - protein, 18 aa, Escherichia coli
NTFYCCELCCYPACAGCN

SEQ ID NO: 103 - protein, 18 aa, Citrobacter freundii
NTFYCCELCCNPACAGCY

SEQ ID NO: 104 - protein, 30 aa, Yersinia enterocolitica
QACDPPSPPAEVSSDWDCCDVCCNPACAGC

SEQ ID NO: 105 - protein, 30 aa, Yersinia enterocolitica
QACDPPLPPAEVSSDWDCCDVCCNPACAGC

SEQ ID NO: 106 - protein, 30 aa, Yersinia enterocolitica
KACDTQTPSPSEENDDWCCEVCCNPACAGC

SEQ ID NO: 107 - protein, 53 aa, Yersinia enterocolitica
QETASGQVGDVSSSTIATEVSEAECGTQSATTQGENDWDWCCELCCNPACFGC

SEQ ID NO: 108 - protein, 16 aa, Yersinia kristensenii
SDWCCEVCCNPACAGC

SEQ ID NO: 109 - protein, 17 aa, Vibrio cholerae
IDCCEICCNPACFGCLN

SEQ ID NO: 110 - protein, 17 aa, Vibrio mimicus
IDCCEICCNPACFGCLN

SEQ ID NO: 111 - protein, 18 aa, Escherichia coli
NTFYCCELCCNPACAPCY

SEQ ID NO: 112 - protein, 13 aa, Vibrio cholerae
IDCCEICCNPACF

SEQ ID NO: 113 - protein, 14 aa, Vibrio cholerae
IDCCEICCNPACFG

SEQ ID NO: 114 - protein, 17 aa, Vibrio mimicus
IDCCEICCNPACFGCLN

SEQ ID NO: 115 - protein, 17 aa, Vibrio mimicus
IDRCEICCNPACFGCLN

SEQ ID NO: 116 - protein, 16 aa, Yersinia enterocolitica
DWDCCDVCCNPACAGC

SEQ ID NO: 117 - protein, 16 aa, Yersinia enterocolitica
DWDCCDVCCNPACAGC

SEQ ID NO: 118 - protein, 17 aa, Yersinia enterocolitica
NDDWCCEVCCNPACAGC

SEQ ID NO: 119 - protein, 16 aa, Yersinia enterocolitica
WDWCCELCCNPACFGC

SEQ ID NO: 120 - protein, 30 aa, Yersinia enterocolitica
QACDPPSPPAEVSSDWDCCDVCCDPACAGC

SEQ ID NO: 121 - protein, 72 aa, Escherichia coli
MKKLMLAIFISVLSFPSFSQSTESLDSSKEKITLETKKCDVVKNNSEKKSENMNNTFYCCELCCNPACAGCY

SEQ ID NO: 122 - protein, 72 aa, Escherichia coli
MKKSILFIFLSVLSFSPFAQDAKPVESSKEKITLESKKCNIAKKSNKSGPESMNSSNYCCELCCNPACTGCY

SEQ ID NO: 123 - protein, 71 aa, Yersinia enterocolitica
MKKIVFVLVLMLSSFGAFGQETVSGQFSDALSTPITAEVYKQACDPPLPPAEVSSDWDCCDVCCNPACAGC

SEQ ID NO: 124 - protein, 53 aa, Artificial Sequence
  Synthetically generated peptide
MKKSILFIFLSVLSFSPFAQDAKPAGSSKEKITLESKKCNIVKKSNKSGPESM

SEQ ID NO: 125 - protein, 53 aa, Escherichia coli
MKKSILFIFLSVLSFSPFAQDAKPAGSSKEKITLESKKCNIVKKNNESSPESM

SEQ ID NO: 126 - protein, 5 aa, Artificial Sequence
  Synthetically generated peptide
NSSNY

SEQ ID NO: 127 - protein, 6 aa, Artificial Sequence
  Synthetically generated peptide
KKKKKK

SEQ ID NO: 128 - protein, 7 aa, Artificial Sequence
  Synthetically generated peptide
DKKKKKK

SEQ ID NO: 129 - protein, 21 aa, Artificial Sequence
  Synthetically generated peptide
  VARIANT (1)..(2): Xaa1 = Asn, Xaa2 = Ser, Xaa3 = Ser, Xaa4 = Asn, Xaa5 = Tyr; or Xaa1, Xaa2, Xaa3, Xaa4 is missing and Xaa5 = Asn
  misc_feature (3)..(5): Xaa can be any naturally occurring amino acid
  VARIANT (8)..(8): Xaa = Glu or Asp
  VARIANT (9)..(9): Xaa = Leu, Ile, Val, Trp, Tyr or Phe
  VARIANT (16)..(16): Xaa =  Thr, Ala, or Trp
  VARIANT (19)..(19): Xaa = Trp, Tyr, Phe or Leu or missing
  VARIANT (20)..(21): Xaa = Asp, Phe
XXXXXCCXXCCNPACXGCXXX

SEQ ID NO: 130 - protein, 13 aa, Artificial Sequence
  Synthetically generated peptide
CCYCCNPACTGCY

SEQ ID NO: 131 - protein, 12 aa, Artificial Sequence
  Synthetically generated peptide
CCCCNPACTGCY

SEQ ID NO: 132 - protein, 11 aa, Artificial Sequence
  Synthetically generated peptide
CCCCPACTGCY

SEQ ID NO: 133 - protein, 10 aa, Artificial Sequence
  Synthetically generated peptide
CCCCACTGCY

SEQ ID NO: 134 - protein, 10 aa, Artificial Sequence
  Synthetically generated peptide
CCCCPCTGCY

SEQ ID NO: 135 - protein, 10 aa, Artificial Sequence
  Synthetically generated peptide
CCCCPACGCY

SEQ ID NO: 136 - protein, 10 aa, Artificial Sequence
  Synthetically generated peptide
CCCCPACTCY

SEQ ID NO: 137 - protein, 10 aa, Artificial Sequence
  Synthetically generated peptide
CCCCPACTGC

SEQ ID NO: 138 - protein, 11 aa, Artificial Sequence
  Synthetically generated peptide
CCCCNACTGCY

SEQ ID NO: 139 - protein, 10 aa, Artificial Sequence
  Synthetically generated peptide
CCCCNCTGCY

SEQ ID NO: 140 - protein, 10 aa, Artificial Sequence
  Synthetically generated peptide
CCCCNACGCY

SEQ ID NO: 141 - protein, 10 aa, Artificial Sequence
  Synthetically generated peptide
CCCCNACTCY

SEQ ID NO: 142 - protein, 10 aa, Artificial Sequence
  Synthetically generated peptide
CCCCNACTGC

SEQ ID NO: 143 - protein, 11 aa, Artificial Sequence
  Synthetically generated peptide
CCCCNPCTGCY

SEQ ID NO: 144 - protein, 10 aa, Artificial Sequence
  Synthetically generated peptide
CCCCNPCGCY

SEQ ID NO: 145 - protein, 10 aa, Artificial Sequence
  Synthetically generated peptide
CCCCNPCTCY

SEQ ID NO: 146 - protein, 10 aa, Artificial Sequence
  Synthetically generated peptide
CCCCNPCTGC

SEQ ID NO: 147 - protein, 11 aa, Artificial Sequence
  Synthetically generated peptide
CCCCNPACGCY

SEQ ID NO: 148 - protein, 10 aa, Artificial Sequence
  Synthetically generated peptide
CCCCNPACCY

SEQ ID NO: 149 - protein, 10 aa, Artificial Sequence
  Synthetically generated peptide
CCCCNPACGC

SEQ ID NO: 150 - protein, 11 aa, Artificial Sequence
  Synthetically generated peptide
CCCCNPACTCY

SEQ ID NO: 151 - protein, 10 aa, Artificial Sequence
  Synthetically generated peptide
CCCCNPACTC

SEQ ID NO: 152 - protein, 11 aa, Artificial Sequence
  Synthetically generated peptide
CCCCNPACTGC

SEQ ID NO: 153 - protein, 12 aa, Artificial Sequence
  Synthetically generated peptide
CCYCCPACTGCY

SEQ ID NO: 154 - protein, 11 aa, Artificial Sequence
  Synthetically generated peptide
CCYCCACTGCY

SEQ ID NO: 155 - protein, 10 aa, Artificial Sequence
  Synthetically generated peptide
CCYCCCTGCY

SEQ ID NO: 156 - protein, 10 aa, Artificial Sequence
  Synthetically generated peptide
CCYCCACGCY

SEQ ID NO: 157 - protein, 10 aa, Artificial Sequence
  Synthetically generated peptide
CCYCCACTCY

SEQ ID NO: 158 - protein, 10 aa, Artificial Sequence
  Synthetically generated peptide
CCYCCACTGC

SEQ ID NO: 159 - protein, 11 aa, Artificial Sequence
  Synthetically generated peptide
CCYCCPCTGCY

SEQ ID NO: 160 - protein, 10 aa, Artificial Sequence
  Synthetically generated peptide
CCYCCPCGCY

SEQ ID NO: 161 - protein, 10 aa, Artificial Sequence
  Synthetically generated peptide
CCYCCPCTCY

SEQ ID NO: 162 - protein, 10 aa, Artificial Sequence
  Synthetically generated peptide
CCYCCPCTGC

SEQ ID NO: 163 - protein, 11 aa, Artificial Sequence
  Synthetically generated peptide
CCYCCPACGCY

SEQ ID NO: 164 - protein, 10 aa, Artificial Sequence
  Synthetically generated peptide
CCYCCPACCY

SEQ ID NO: 165 - protein, 10 aa, Artificial Sequence
  Synthetically generated peptide
CCYCCPACGC

SEQ ID NO: 166 - protein, 11 aa, Artificial Sequence
  Synthetically generated peptide
CCYCCPACTCY

SEQ ID NO: 167 - protein, 10 aa, Artificial Sequence
  Synthetically generated peptide
CCYCCPACTC

SEQ ID NO: 168 - protein, 11 aa, Artificial Sequence
  Synthetically generated peptide
CCYCCPACTGC

SEQ ID NO: 169 - protein, 12 aa, Artificial Sequence
  Synthetically generated peptide
CCYCCNACTGCY

SEQ ID NO: 170 - protein, 11 aa, Artificial Sequence
  Synthetically generated peptide
CCYCCNCTGCY

SEQ ID NO: 171 - protein, 10 aa, Artificial Sequence
  Synthetically generated peptide
CCYCCNCGCY

SEQ ID NO: 172 - protein, 10 aa, Artificial Sequence
  Synthetically generated peptide
CCYCCNCTCY

SEQ ID NO: 173 - protein, 10 aa, Artificial Sequence
  Synthetically generated peptide
CCYCCNCTGC

SEQ ID NO: 174 - protein, 11 aa, Artificial Sequence
  Synthetically generated peptide
CCYCCNACGCY

SEQ ID NO: 175 - protein, 10 aa, Artificial Sequence
  Synthetically generated peptide
CCYCCNACCY

SEQ ID NO: 176 - protein, 10 aa, Artificial Sequence
  Synthetically generated peptide
CCYCCNACGC

SEQ ID NO: 177 - protein, 11 aa, Artificial Sequence
  Synthetically generated peptide
CCYCCNACTCY

SEQ ID NO: 178 - protein, 10 aa, Artificial Sequence
  Synthetically generated peptide
CCYCCNACTC

SEQ ID NO: 179 - protein, 11 aa, Artificial Sequence
  Synthetically generated peptide
CCYCCNACTGC

SEQ ID NO: 180 - protein, 12 aa, Artificial Sequence
  Synthetically generated peptide
CCYCCNPCTGCY

SEQ ID NO: 181 - protein, 11 aa, Artificial Sequence
  Synthetically generated peptide
CCYCCNPCGCY

SEQ ID NO: 182 - protein, 10 aa, Artificial Sequence
  Synthetically generated peptide
CCYCCNPCCY

SEQ ID NO: 183 - protein, 10 aa, Artificial Sequence
  Synthetically generated peptide
CCYCCNPCGC

SEQ ID NO: 184 - protein, 11 aa, Artificial Sequence
  Synthetically generated peptide
CCYCCNPCTCY

SEQ ID NO: 185 - protein, 10 aa, Artificial Sequence
  Synthetically generated peptide
CCYCCNPCTC

SEQ ID NO: 186 - protein, 11 aa, Artificial Sequence
  Synthetically generated peptide
CCYCCNPCTGC

SEQ ID NO: 187 - protein, 12 aa, Artificial Sequence
  Synthetically generated peptide
CCYCCNPACGCY

SEQ ID NO: 188 - protein, 11 aa, Artificial Sequence
  Synthetically generated peptide
CCYCCNPACCY

SEQ ID NO: 189 - protein, 10 aa, Artificial Sequence
  Synthetically generated peptide
CCYCCNPACC

SEQ ID NO: 190 - protein, 11 aa, Artificial Sequence
  Synthetically generated peptide
CCYCCNPACGC

SEQ ID NO: 191 - protein, 12 aa, Artificial Sequence
  Synthetically generated peptide
CCYCCNPACTCY

SEQ ID NO: 192 - protein, 11 aa, Artificial Sequence
  Synthetically generated peptide
CCYCCNPACTC

SEQ ID NO: 193 - protein, 12 aa, Artificial Sequence
  Synthetically generated peptide
CCYCCNPACTGC

SEQ ID NO: 194 - protein, 13 aa, Artificial Sequence
  Synthetically generated peptide
CCECCNPACTGCY

SEQ ID NO: 195 - protein, 12 aa, Artificial Sequence
  Synthetically generated peptide
CCECCPACTGCY

SEQ ID NO: 196 - protein, 11 aa, Artificial Sequence
  Synthetically generated peptide
CCECCACTGCY

SEQ ID NO: 197 - protein, 10 aa, Artificial Sequence
  Synthetically generated peptide
CCECCCTGCY

SEQ ID NO: 198 - protein, 10 aa, Artificial Sequence
  Synthetically generated peptide
CCECCACGCY

SEQ ID NO: 199 - protein, 10 aa, Artificial Sequence
  Synthetically generated peptide
CCECCACTCY

SEQ ID NO: 200 - protein, 10 aa, Artificial Sequence
  Synthetically generated peptide
CCECCACTGC

SEQ ID NO: 201 - protein, 11 aa, Artificial Sequence
  Synthetically generated peptide
CCECCPCTGCY

SEQ ID NO: 202 - protein, 10 aa, Artificial Sequence
  Synthetically generated peptide
CCECCPCGCY

SEQ ID NO: 203 - protein, 10 aa, Artificial Sequence
  Synthetically generated peptide
CCECCPCTCY

SEQ ID NO: 204 - protein, 10 aa, Artificial Sequence
  Synthetically generated peptide
CCECCPCTGC

SEQ ID NO: 205 - protein, 11 aa, Artificial Sequence
  Synthetically generated peptide
CCECCPACGCY

SEQ ID NO: 206 - protein, 10 aa, Artificial Sequence
  Synthetically generated peptide
CCECCPACCY

SEQ ID NO: 207 - protein, 10 aa, Artificial Sequence
  Synthetically generated peptide
CCECCPACGC

SEQ ID NO: 208 - protein, 11 aa, Artificial Sequence
  Synthetically generated peptide
CCECCPACTCY

SEQ ID NO: 209 - protein, 10 aa, Artificial Sequence
  Synthetically generated peptide
CCECCPACTC

SEQ ID NO: 210 - protein, 11 aa, Artificial Sequence
  Synthetically generated peptide
CCECCPACTGC

SEQ ID NO: 211 - protein, 12 aa, Artificial Sequence
  Synthetically generated peptide
CCECCNACTGCY

SEQ ID NO: 212 - protein, 11 aa, Artificial Sequence
  Synthetically generated peptide
CCECCNCTGCY

SEQ ID NO: 213 - protein, 10 aa, Artificial Sequence
  Synthetically generated peptide
CCECCNCGCY

SEQ ID NO: 214 - protein, 10 aa, Artificial Sequence
  Synthetically generated peptide
CCECCNCTCY

SEQ ID NO: 215 - protein, 10 aa, Artificial Sequence
  Synthetically generated peptide
CCECCNCTGC

SEQ ID NO: 216 - protein, 11 aa, Artificial Sequence
  Synthetically generated peptide
CCECCNACGCY

SEQ ID NO: 217 - protein, 10 aa, Artificial Sequence
  Synthetically generated peptide
CCECCNACCY

SEQ ID NO: 218 - protein, 10 aa, Artificial Sequence
  Synthetically generated peptide
CCECCNACGC

SEQ ID NO: 219 - protein, 11 aa, Artificial Sequence
  Synthetically generated peptide
CCECCNACTCY

SEQ ID NO: 220 - protein, 10 aa, Artificial Sequence
  Synthetically generated peptide
CCECCNACTC

SEQ ID NO: 221 - protein, 11 aa, Artificial Sequence
  Synthetically generated peptide
CCECCNACTGC

SEQ ID NO: 222 - protein, 12 aa, Artificial Sequence
  Synthetically generated peptide
CCECCNPCTGCY

SEQ ID NO: 223 - protein, 11 aa, Artificial Sequence
  Synthetically generated peptide
CCECCNPCGCY

SEQ ID NO: 224 - protein, 10 aa, Artificial Sequence
  Synthetically generated peptide
CCECCNPCCY

SEQ ID NO: 225 - protein, 10 aa, Artificial Sequence
  Synthetically generated peptide
CCECCNPCGC

SEQ ID NO: 226 - protein, 11 aa, Artificial Sequence
  Synthetically generated peptide
CCECCNPCTCY

SEQ ID NO: 227 - protein, 10 aa, Artificial Sequence
  Synthetically generated peptide
CCECCNPCTC

SEQ ID NO: 228 - protein, 11 aa, Artificial Sequence
  Synthetically generated peptide
CCECCNPCTGC

SEQ ID NO: 229 - protein, 12 aa, Artificial Sequence
  Synthetically generated peptide
CCECCNPACGCY

SEQ ID NO: 230 - protein, 11 aa, Artificial Sequence
  Synthetically generated peptide
CCECCNPACCY

SEQ ID NO: 231 - protein, 10 aa, Artificial Sequence
  Synthetically generated peptide
CCECCNPACC

SEQ ID NO: 232 - protein, 11 aa, Artificial Sequence
  Synthetically generated peptide
CCECCNPACGC

SEQ ID NO: 233 - protein, 12 aa, Artificial Sequence
  Synthetically generated peptide
CCECCNPACTCY

SEQ ID NO: 234 - protein, 11 aa, Artificial Sequence
  Synthetically generated peptide
CCECCNPACTC

SEQ ID NO: 235 - protein, 12 aa, Artificial Sequence
  Synthetically generated peptide
CCECCNPACTGC

SEQ ID NO: 236 - protein, 13 aa, Artificial Sequence
  Synthetically generated peptide
CCEYCCPACTGCY

SEQ ID NO: 237 - protein, 12 aa, Artificial Sequence
  Synthetically generated peptide
CCEYCCACTGCY

SEQ ID NO: 238 - protein, 11 aa, Artificial Sequence
  Synthetically generated peptide
CCEYCCCTGCY

SEQ ID NO: 239 - protein, 10 aa, Artificial Sequence
  Synthetically generated peptide
CCEYCCCGCY

SEQ ID NO: 240 - protein, 10 aa, Artificial Sequence
  Synthetically generated peptide
CCEYCCCTCY

SEQ ID NO: 241 - protein, 10 aa, Artificial Sequence
  Synthetically generated peptide
CCEYCCCTGC

SEQ ID NO: 242 - protein, 11 aa, Artificial Sequence
  Synthetically generated peptide
CCEYCCACGCY

SEQ ID NO: 243 - protein, 10 aa, Artificial Sequence
  Synthetically generated peptide
CCEYCCACCY

SEQ ID NO: 244 - protein, 10 aa, Artificial Sequence
  Synthetically generated peptide
CCEYCCACGC

SEQ ID NO: 245 - protein, 11 aa, Artificial Sequence
  Synthetically generated peptide
CCEYCCACTCY

SEQ ID NO: 246 - protein, 10 aa, Artificial Sequence
  Synthetically generated peptide
CCEYCCACTC

SEQ ID NO: 247 - protein, 11 aa, Artificial Sequence
  Synthetically generated peptide
CCEYCCACTGC

SEQ ID NO: 248 - protein, 12 aa, Artificial Sequence
  Synthetically generated peptide
CCEYCCPCTGCY

SEQ ID NO: 249 - protein, 11 aa, Artificial Sequence
  Synthetically generated peptide
CCEYCCPCGCY

SEQ ID NO: 250 - protein, 10 aa, Artificial Sequence
  Synthetically generated peptide
CCEYCCPCCY

SEQ ID NO: 251 - protein, 10 aa, Artificial Sequence
  Synthetically generated peptide
CCEYCCPCGC

SEQ ID NO: 252 - protein, 11 aa, Artificial Sequence
  Synthetically generated peptide
CCEYCCPCTCY

SEQ ID NO: 253 - protein, 10 aa, Artificial Sequence
  Synthetically generated peptide
CCEYCCPCTC

SEQ ID NO: 254 - protein, 11 aa, Artificial Sequence
  Synthetically generated peptide
CCEYCCPCTGC

SEQ ID NO: 255 - protein, 12 aa, Artificial Sequence
  Synthetically generated peptide
CCEYCCPACGCY

SEQ ID NO: 256 - protein, 11 aa, Artificial Sequence
  Synthetically generated peptide
CCEYCCPACCY

SEQ ID NO: 257 - protein, 10 aa, Artificial Sequence
  Synthetically generated peptide
CCEYCCPACC

SEQ ID NO: 258 - protein, 11 aa, Artificial Sequence
  Synthetically generated peptide
CCEYCCPACGC

SEQ ID NO: 259 - protein, 12 aa, Artificial Sequence
  Synthetically generated peptide
CCEYCCPACTCY

SEQ ID NO: 260 - protein, 11 aa, Artificial Sequence
  Synthetically generated peptide
CCEYCCPACTC

SEQ ID NO: 261 - protein, 12 aa, Artificial Sequence
  Synthetically generated peptide
CCEYCCPACTGC

SEQ ID NO: 262 - protein, 13 aa, Artificial Sequence
  Synthetically generated peptide
CCEYCCNACTGCY

SEQ ID NO: 263 - protein, 12 aa, Artificial Sequence
  Synthetically generated peptide
CCEYCCNCTGCY

SEQ ID NO: 264 - protein, 11 aa, Artificial Sequence
  Synthetically generated peptide
CCEYCCNCGCY

SEQ ID NO: 265 - protein, 10 aa, Artificial Sequence
  Synthetically generated peptide
CCEYCCNCCY

SEQ ID NO: 266 - protein, 10 aa, Artificial Sequence
  Synthetically generated peptide
CCEYCCNCGC

SEQ ID NO: 267 - protein, 11 aa, Artificial Sequence
  Synthetically generated peptide
CCEYCCNCTCY

SEQ ID NO: 268 - protein, 10 aa, Artificial Sequence
  Synthetically generated peptide
CCEYCCNCTC

SEQ ID NO: 269 - protein, 11 aa, Artificial Sequence
  Synthetically generated peptide
CCEYCCNCTGC

SEQ ID NO: 270 - protein, 12 aa, Artificial Sequence
  Synthetically generated peptide
CCEYCCNACGCY

SEQ ID NO: 271 - protein, 11 aa, Artificial Sequence
  Synthetically generated peptide
CCEYCCNACCY

SEQ ID NO: 272 - protein, 10 aa, Artificial Sequence
  Synthetically generated peptide
CCEYCCNACC

SEQ ID NO: 273 - protein, 11 aa, Artificial Sequence
  Synthetically generated peptide
CCEYCCNACGC

SEQ ID NO: 274 - protein, 12 aa, Artificial Sequence
  Synthetically generated peptide
CCEYCCNACTCY

SEQ ID NO: 275 - protein, 11 aa, Artificial Sequence
  Synthetically generated peptide
CCEYCCNACTC

SEQ ID NO: 276 - protein, 12 aa, Artificial Sequence
  Synthetically generated peptide
CCEYCCNACTGC

SEQ ID NO: 277 - protein, 13 aa, Artificial Sequence
  Synthetically generated peptide
CCEYCCNPCTGCY

SEQ ID NO: 278 - protein, 12 aa, Artificial Sequence
  Synthetically generated peptide
CCEYCCNPCGCY

SEQ ID NO: 279 - protein, 11 aa, Artificial Sequence
  Synthetically generated peptide
CCEYCCNPCCY

SEQ ID NO: 280 - protein, 10 aa, Artificial Sequence
  Synthetically generated peptide
CCEYCCNPCC

SEQ ID NO: 281 - protein, 11 aa, Artificial Sequence
  Synthetically generated peptide
CCEYCCNPCGC

SEQ ID NO: 282 - protein, 12 aa, Artificial Sequence
  Synthetically generated peptide
CCEYCCNPCTCY

SEQ ID NO: 283 - protein, 11 aa, Artificial Sequence
  Synthetically generated peptide
CCEYCCNPCTC

SEQ ID NO: 284 - protein, 12 aa, Artificial Sequence
  Synthetically generated peptide
CCEYCCNPCTGC

SEQ ID NO: 285 - protein, 13 aa, Artificial Sequence
  Synthetically generated peptide
CCEYCCNPACGCY

SEQ ID NO: 286 - protein, 12 aa, Artificial Sequence
  Synthetically generated peptide
CCEYCCNPACCY

SEQ ID NO: 287 - protein, 11 aa, Artificial Sequence
  Synthetically generated peptide
CCEYCCNPACC

SEQ ID NO: 288 - protein, 12 aa, Artificial Sequence
  Synthetically generated peptide
CCEYCCNPACGC

SEQ ID NO: 289 - protein, 13 aa, Artificial Sequence
  Synthetically generated peptide
CCEYCCNPACTCY

SEQ ID NO: 290 - protein, 12 aa, Artificial Sequence
  Synthetically generated peptide
CCEYCCNPACTC

SEQ ID NO: 291 - protein, 13 aa, Artificial Sequence
  Synthetically generated peptide
CCEYCCNPACTGC

SEQ ID NO: 292 - protein, 13 aa, Artificial Sequence
  Synthetically generated peptide
  VARIANT (1)..(1): Xaa = Any Amino Acid
XEYCCNPACTGCY

SEQ ID NO: 293 - protein, 16 aa, Artificial Sequence
  Synthetically generated peptide
  VARIANT (3)..(4): Xaa = Any Amino Acid
CCXXEYCCNPACTGCY

SEQ ID NO: 294 - protein, 17 aa, Artificial Sequence
  Synthetically generated peptide
  VARIANT (3)..(4): Xaa = Any Amino Acid
  misc_feature (5)..(5): Xaa can be any naturally occurring amino acid
CCXXXEYCCNPACTGCY

SEQ ID NO: 295 - protein, 18 aa, Artificial Sequence
  Synthetically generated peptide
  VARIANT (3)..(4): Xaa = Any Amino Acid
  misc_feature (5)..(6): Xaa can be any naturally occurring amino acid
CCXXXXEYCCNPACTGCY

SEQ ID NO: 296 - protein, 18 aa, Artificial Sequence
  Synthetically generated peptide
  VARIANT (3)..(4): Xaa = Any Amino Acid
  misc_feature (5)..(5): Xaa can be any naturally occurring amino acid
  misc_feature (7)..(7): Xaa can be any naturally occurring amino acid
CCXXXEXYCCNPACTGCY

SEQ ID NO: 297 - protein, 18 aa, Artificial Sequence
  Synthetically generated peptide
  VARIANT (3)..(4): Xaa = Any Amino Acid
  misc_feature (5)..(5): Xaa can be any naturally occurring amino acid
  misc_feature (8)..(8): Xaa can be any naturally occurring amino acid
CCXXXEYXCCNPACTGCY

SEQ ID NO: 298 - protein, 18 aa, Artificial Sequence
  Synthetically generated peptide
  VARIANT (3)..(4): Xaa = Any Amino Acid
  misc_feature (5)..(5): Xaa can be any naturally occurring amino acid
  misc_feature (10)..(10): Xaa can be any naturally occurring amino acid
CCXXXEYCCXNPACTGCY

SEQ ID NO: 299 - protein, 18 aa, Artificial Sequence
  Synthetically generated peptide
  VARIANT (3)..(4): Xaa = Any Amino Acid
  misc_feature (5)..(5): Xaa can be any naturally occurring amino acid
  misc_feature (11)..(11): Xaa can be any naturally occurring amino acid
CCXXXEYCCNXPACTGCY

SEQ ID NO: 300 - protein, 18 aa, Artificial Sequence
  Synthetically generated peptide
  VARIANT (3)..(4): Xaa = Any Amino Acid
  misc_feature (5)..(5): Xaa can be any naturally occurring amino acid
  misc_feature (12)..(12): Xaa can be any naturally occurring amino acid
CCXXXEYCCNPXACTGCY

SEQ ID NO: 301 - protein, 18 aa, Artificial Sequence
  Synthetically generated peptide
  VARIANT (3)..(4): Xaa = Any Amino Acid
  misc_feature (5)..(5): Xaa can be any naturally occurring amino acid
  misc_feature (13)..(13): Xaa can be any naturally occurring amino acid
CCXXXEYCCNPAXCTGCY

SEQ ID NO: 302 - protein, 18 aa, Artificial Sequence
  Synthetically generated peptide
  VARIANT (3)..(4): Xaa = Any Amino Acid
  misc_feature (5)..(5): Xaa can be any naturally occurring amino acid
  misc_feature (14)..(14): Xaa can be any naturally occurring amino acid
CCXXXEYCCNPACXTGCY

SEQ ID NO: 303 - protein, 18 aa, Artificial Sequence
  Synthetically generated peptide
  VARIANT (3)..(4): Xaa = Any Amino Acid
  misc_feature (5)..(5): Xaa can be any naturally occurring amino acid
  misc_feature (15)..(15): Xaa can be any naturally occurring amino acid
CCXXXEYCCNPACTXGCY

SEQ ID NO: 304 - protein, 18 aa, Artificial Sequence
  Synthetically generated peptide
  VARIANT (3)..(4): Xaa = Any Amino Acid
  misc_feature (5)..(5): Xaa can be any naturally occurring amino acid
  misc_feature (16)..(16): Xaa can be any naturally occurring amino acid
CCXXXEYCCNPACTGXCY

SEQ ID NO: 305 - protein, 18 aa, Artificial Sequence
  Synthetically generated peptide
  VARIANT (3)..(4): Xaa = Any Amino Acid
  misc_feature (5)..(5): Xaa can be any naturally occurring amino acid
  misc_feature (17)..(17): Xaa can be any naturally occurring amino acid
CCXXXEYCCNPACTGCXY

SEQ ID NO: 306 - protein, 17 aa, Artificial Sequence
  Synthetically generated peptide
  VARIANT (3)..(4): Xaa = Any Amino Acid
  misc_feature (6)..(6): Xaa can be any naturally occurring amino acid
CCXXEXYCCNPACTGCY

SEQ ID NO: 307 - protein, 18 aa, Artificial Sequence
  Synthetically generated peptide
  VARIANT (3)..(4): Xaa = Any Amino Acid
  misc_feature (6)..(7): Xaa can be any naturally occurring amino acid
CCXXEXXYCCNPACTGCY

SEQ ID NO: 308 - protein, 18 aa, Artificial Sequence
  Synthetically generated peptide
  VARIANT (3)..(4): Xaa = Any Amino Acid
  misc_feature (6)..(6): Xaa can be any naturally occurring amino acid
  misc_feature (8)..(8): Xaa can be any naturally occurring amino acid
CCXXEXYXCCNPACTGCY

SEQ ID NO: 309 - protein, 18 aa, Artificial Sequence
  Synthetically generated peptide
  VARIANT (3)..(4): Xaa = Any Amino Acid
  misc_feature (6)..(6): Xaa can be any naturally occurring amino acid
  misc_feature (10)..(10): Xaa can be any naturally occurring amino acid
CCXXEXYCCXNPACTGCY

SEQ ID NO: 310 - protein, 18 aa, Artificial Sequence
  Synthetically generated peptide
  VARIANT (3)..(4): Xaa = Any Amino Acid
  misc_feature (6)..(6): Xaa can be any naturally occurring amino acid
  misc_feature (11)..(11): Xaa can be any naturally occurring amino acid
CCXXEXYCCNXPACTGCY

SEQ ID NO: 311 - protein, 18 aa, Artificial Sequence
  Synthetically generated peptide
  VARIANT (3)..(4): Xaa = Any Amino Acid
  misc_feature (6)..(6): Xaa can be any naturally occurring amino acid
  misc_feature (12)..(12): Xaa can be any naturally occurring amino acid
CCXXEXYCCNPXACTGCY

SEQ ID NO: 312 - protein, 18 aa, Artificial Sequence
  Synthetically generated peptide
  VARIANT (3)..(4): Xaa = Any Amino Acid
  misc_feature (6)..(6): Xaa can be any naturally occurring amino acid
  misc_feature (13)..(13): Xaa can be any naturally occurring amino acid
CCXXEXYCCNPAXCTGCY

SEQ ID NO: 313 - protein, 18 aa, Artificial Sequence
  Synthetically generated peptide
  VARIANT (3)..(4): Xaa = Any Amino Acid
  misc_feature (6)..(6): Xaa can be any naturally occurring amino acid
  misc_feature (14)..(14): Xaa can be any naturally occurring amino acid
CCXXEXYCCNPACXTGCY

SEQ ID NO: 314 - protein, 18 aa, Artificial Sequence
  Synthetically generated peptide
  VARIANT (3)..(4): Xaa = Any Amino Acid
  misc_feature (6)..(6): Xaa can be any naturally occurring amino acid
  misc_feature (15)..(15): Xaa can be any naturally occurring amino acid
CCXXEXYCCNPACTXGCY

SEQ ID NO: 315 - protein, 18 aa, Artificial Sequence
  Synthetically generated peptide
  VARIANT (3)..(4): Xaa = Any Amino Acid
  misc_feature (6)..(6): Xaa can be any naturally occurring amino acid
  misc_feature (16)..(16): Xaa can be any naturally occurring amino acid
CCXXEXYCCNPACTGXCY

SEQ ID NO: 316 - protein, 18 aa, Artificial Sequence
  Synthetically generated peptide
  VARIANT (3)..(4): Xaa = Any Amino Acid
  misc_feature (6)..(6): Xaa can be any naturally occurring amino acid
  misc_feature (17)..(17): Xaa can be any naturally occurring amino acid
CCXXEXYCCNPACTGCXY

SEQ ID NO: 317 - protein, 17 aa, Artificial Sequence
  Synthetically generated peptide
  VARIANT (3)..(4): Xaa = Any Amino Acid
  misc_feature (7)..(7): Xaa can be any naturally occurring amino acid
CCXXEYXCCNPACTGCY

SEQ ID NO: 318 - protein, 18 aa, Artificial Sequence
  Synthetically generated peptide
  VARIANT (3)..(4): Xaa = Any Amino Acid
  misc_feature (7)..(8): Xaa can be any naturally occurring amino acid
CCXXEYXXCCNPACTGCY

SEQ ID NO: 319 - protein, 18 aa, Artificial Sequence
  Synthetically generated peptide
  VARIANT (3)..(4): Xaa = Any Amino Acid
  misc_feature (7)..(7): Xaa can be any naturally occurring amino acid
  misc_feature (10)..(10): Xaa can be any naturally occurring amino acid
CCXXEYXCCXNPACTGCY

SEQ ID NO: 320 - protein, 18 aa, Artificial Sequence
  Synthetically generated peptide
  VARIANT (3)..(4): Xaa = Any Amino Acid
  misc_feature (7)..(7): Xaa can be any naturally occurring amino acid
  misc_feature (11)..(11): Xaa can be any naturally occurring amino acid
CCXXEYXCCNXPACTGCY

SEQ ID NO: 321 - protein, 18 aa, Artificial Sequence
  Synthetically generated peptide
  VARIANT (3)..(4): Xaa = Any Amino Acid
  misc_feature (7)..(7): Xaa can be any naturally occurring amino acid
  misc_feature (12)..(12): Xaa can be any naturally occurring amino acid
CCXXEYXCCNPXACTGCY

SEQ ID NO: 322 - protein, 18 aa, Artificial Sequence
  Synthetically generated peptide
  VARIANT (3)..(4): Xaa = Any Amino Acid
  misc_feature (7)..(7): Xaa can be any naturally occurring amino acid
  misc_feature (13)..(13): Xaa can be any naturally occurring amino acid
CCXXEYXCCNPAXCTGCY

SEQ ID NO: 323 - protein, 18 aa, Artificial Sequence
  Synthetically generated peptide
  VARIANT (3)..(4): Xaa = Any Amino Acid
  misc_feature (7)..(7): Xaa can be any naturally occurring amino acid
  misc_feature (14)..(14): Xaa can be any naturally occurring amino acid
CCXXEYXCCNPACXTGCY

SEQ ID NO: 324 - protein, 18 aa, Artificial Sequence
  Synthetically generated peptide
  VARIANT (3)..(4): Xaa = Any Amino Acid
  misc_feature (7)..(7): Xaa can be any naturally occurring amino acid
  misc_feature (15)..(15): Xaa can be any naturally occurring amino acid
CCXXEYXCCNPACTXGCY

SEQ ID NO: 325 - protein, 18 aa, Artificial Sequence
  Synthetically generated peptide
  VARIANT (3)..(4): Xaa = Any Amino Acid
  misc_feature (7)..(7): Xaa can be any naturally occurring amino acid
  misc_feature (16)..(16): Xaa can be any naturally occurring amino acid
CCXXEYXCCNPACTGXCY

SEQ ID NO: 326 - protein, 18 aa, Artificial Sequence
  Synthetically generated peptide
  VARIANT (3)..(4): Xaa = Any Amino Acid
  misc_feature (7)..(7): Xaa can be any naturally occurring amino acid
  misc_feature (17)..(17): Xaa can be any naturally occurring amino acid
CCXXEYXCCNPACTGCXY

SEQ ID NO: 327 - protein, 17 aa, Artificial Sequence
  Synthetically generated peptide
  VARIANT (3)..(4): Xaa = Any Amino Acid
  misc_feature (9)..(9): Xaa can be any naturally occurring amino acid
CCXXEYCCXNPACTGCY

SEQ ID NO: 328 - protein, 18 aa, Artificial Sequence
  Synthetically generated peptide
  VARIANT (3)..(4): Xaa = Any Amino Acid
  misc_feature (9)..(10): Xaa can be any naturally occurring amino acid
CCXXEYCCXXNPACTGCY

SEQ ID NO: 329 - protein, 18 aa, Artificial Sequence
  Synthetically generated peptide
  VARIANT (3)..(4): Xaa = Any Amino Acid
  misc_feature (9)..(9): Xaa can be any naturally occurring amino acid
  misc_feature (11)..(11): Xaa can be any naturally occurring amino acid
CCXXEYCCXNXPACTGCY

SEQ ID NO: 330 - protein, 18 aa, Artificial Sequence
  Synthetically generated peptide
  VARIANT (3)..(4): Xaa = Any Amino Acid
  misc_feature (9)..(9): Xaa can be any naturally occurring amino acid
  misc_feature (12)..(12): Xaa can be any naturally occurring amino acid
CCXXEYCCXNPXACTGCY

SEQ ID NO: 331 - protein, 18 aa, Artificial Sequence
  Synthetically generated peptide
  VARIANT (3)..(4): Xaa = Any Amino Acid
  misc_feature (9)..(9): Xaa can be any naturally occurring amino acid
  misc_feature (13)..(13): Xaa can be any naturally occurring amino acid
CCXXEYCCXNPAXCTGCY

SEQ ID NO: 332 - protein, 18 aa, Artificial Sequence
  Synthetically generated peptide
  VARIANT (3)..(4): Xaa = Any Amino Acid
  misc_feature (9)..(9): Xaa can be any naturally occurring amino acid
  misc_feature (14)..(14): Xaa can be any naturally occurring amino acid
CCXXEYCCXNPACXTGCY

SEQ ID NO: 333 - protein, 18 aa, Artificial Sequence
  Synthetically generated peptide
  VARIANT (3)..(4): Xaa = Any Amino Acid
  misc_feature (9)..(9): Xaa can be any naturally occurring amino acid
  misc_feature (15)..(15): Xaa can be any naturally occurring amino acid
CCXXEYCCXNPACTXGCY

SEQ ID NO: 334 - protein, 18 aa, Artificial Sequence
  Synthetically generated peptide
  VARIANT (3)..(4): Xaa = Any Amino Acid
  misc_feature (9)..(9): Xaa can be any naturally occurring amino acid
  misc_feature (16)..(16): Xaa can be any naturally occurring amino acid
CCXXEYCCXNPACTGXCY

SEQ ID NO: 335 - protein, 18 aa, Artificial Sequence
  Synthetically generated peptide
  VARIANT (3)..(4): Xaa = Any Amino Acid
  misc_feature (9)..(9): Xaa can be any naturally occurring amino acid
  misc_feature (17)..(17): Xaa can be any naturally occurring amino acid
CCXXEYCCXNPACTGCXY

SEQ ID NO: 336 - protein, 17 aa, Artificial Sequence
  Synthetically generated peptide
  VARIANT (3)..(4): Xaa = Any Amino Acid
  misc_feature (10)..(10): Xaa can be any naturally occurring amino acid
CCXXEYCCNXPACTGCY

SEQ ID NO: 337 - protein, 18 aa, Artificial Sequence
  Synthetically generated peptide
  VARIANT (3)..(4): Xaa = Any Amino Acid
  misc_feature (10)..(11): Xaa can be any naturally occurring amino acid
CCXXEYCCNXXPACTGCY

SEQ ID NO: 338 - protein, 18 aa, Artificial Sequence
  Synthetically generated peptide
  VARIANT (3)..(4): Xaa = Any Amino Acid
  misc_feature (10)..(10): Xaa can be any naturally occurring amino acid
  misc_feature (12)..(12): Xaa can be any naturally occurring amino acid
CCXXEYCCNXPXACTGCY

SEQ ID NO: 339 - protein, 18 aa, Artificial Sequence
  Synthetically generated peptide
  VARIANT (3)..(4): Xaa = Any Amino Acid
  misc_feature (10)..(10): Xaa can be any naturally occurring amino acid
  misc_feature (13)..(13): Xaa can be any naturally occurring amino acid
CCXXEYCCNXPAXCTGCY

SEQ ID NO: 340 - protein, 18 aa, Artificial Sequence
  Synthetically generated peptide
  VARIANT (3)..(4): Xaa = Any Amino Acid
  misc_feature (10)..(10): Xaa can be any naturally occurring amino acid
  misc_feature (14)..(14): Xaa can be any naturally occurring amino acid
CCXXEYCCNXPACXTGCY

SEQ ID NO: 341 - protein, 18 aa, Artificial Sequence
  Synthetically generated peptide
  VARIANT (3)..(4): Xaa = Any Amino Acid
  misc_feature (10)..(10): Xaa can be any naturally occurring amino acid
  misc_feature (15)..(15): Xaa can be any naturally occurring amino acid
CCXXEYCCNXPACTXGCY

SEQ ID NO: 342 - protein, 18 aa, Artificial Sequence
  Synthetically generated peptide
  VARIANT (3)..(4): Xaa = Any Amino Acid
  misc_feature (10)..(10): Xaa can be any naturally occurring amino acid
  misc_feature (16)..(16): Xaa can be any naturally occurring amino acid
CCXXEYCCNXPACTGXCY

SEQ ID NO: 343 - protein, 18 aa, Artificial Sequence
  Synthetically generated peptide
  VARIANT (3)..(4): Xaa = Any Amino Acid
  misc_feature (10)..(10): Xaa can be any naturally occurring amino acid
  misc_feature (17)..(17): Xaa can be any naturally occurring amino acid
CCXXEYCCNXPACTGCXY

SEQ ID NO: 344 - protein, 17 aa, Artificial Sequence
  Synthetically generated peptide
  VARIANT (3)..(4): Xaa = Any Amino Acid
  misc_feature (11)..(11): Xaa can be any naturally occurring amino acid
CCXXEYCCNPXACTGCY

SEQ ID NO: 345 - protein, 18 aa, Artificial Sequence
  Synthetically generated peptide
  VARIANT (3)..(4): Xaa = Any Amino Acid
  misc_feature (11)..(12): Xaa can be any naturally occurring amino acid
CCXXEYCCNPXXACTGCY

SEQ ID NO: 346 - protein, 18 aa, Artificial Sequence
  Synthetically generated peptide
  VARIANT (3)..(4): Xaa = Any Amino Acid
  misc_feature (11)..(11): Xaa can be any naturally occurring amino acid
  misc_feature (13)..(13): Xaa can be any naturally occurring amino acid
CCXXEYCCNPXAXCTGCY

SEQ ID NO: 347 - protein, 18 aa, Artificial Sequence
  Synthetically generated peptide
  VARIANT (3)..(4): Xaa = Any Amino Acid
  misc_feature (11)..(11): Xaa can be any naturally occurring amino acid
  misc_feature (14)..(14): Xaa can be any naturally occurring amino acid
CCXXEYCCNPXACXTGCY

SEQ ID NO: 348 - protein, 18 aa, Artificial Sequence
  Synthetically generated peptide
  VARIANT (3)..(4): Xaa = Any Amino Acid
  misc_feature (11)..(11): Xaa can be any naturally occurring amino acid
  misc_feature (15)..(15): Xaa can be any naturally occurring amino acid
CCXXEYCCNPXACTXGCY

SEQ ID NO: 349 - protein, 18 aa, Artificial Sequence
  Synthetically generated peptide
  VARIANT (3)..(4): Xaa = Any Amino Acid
  misc_feature (11)..(11): Xaa can be any naturally occurring amino acid
  misc_feature (16)..(16): Xaa can be any naturally occurring amino acid
CCXXEYCCNPXACTGXCY

SEQ ID NO: 350 - protein, 18 aa, Artificial Sequence
  Synthetically generated peptide
  VARIANT (3)..(4): Xaa = Any Amino Acid
  misc_feature (11)..(11): Xaa can be any naturally occurring amino acid
  misc_feature (17)..(17): Xaa can be any naturally occurring amino acid
CCXXEYCCNPXACTGCXY

SEQ ID NO: 351 - protein, 17 aa, Artificial Sequence
  Synthetically generated peptide
  VARIANT (3)..(4): Xaa = Any Amino Acid
  misc_feature (12)..(12): Xaa can be any naturally occurring amino acid
CCXXEYCCNPAXCTGCY

SEQ ID NO: 352 - protein, 18 aa, Artificial Sequence
  Synthetically generated peptide
  VARIANT (3)..(4): Xaa = Any Amino Acid
  misc_feature (12)..(13): Xaa can be any naturally occurring amino acid
CCXXEYCCNPAXXCTGCY

SEQ ID NO: 353 - protein, 18 aa, Artificial Sequence
  Synthetically generated peptide
  VARIANT (3)..(4): Xaa = Any Amino Acid
  misc_feature (12)..(12): Xaa can be any naturally occurring amino acid
  misc_feature (14)..(14): Xaa can be any naturally occurring amino acid
CCXXEYCCNPAXCXTGCY

SEQ ID NO: 354 - protein, 18 aa, Artificial Sequence
  Synthetically generated peptide
  VARIANT (3)..(4): Xaa = Any Amino Acid
  misc_feature (12)..(12): Xaa can be any naturally occurring amino acid
  misc_feature (15)..(15): Xaa can be any naturally occurring amino acid
CCXXEYCCNPAXCTXGCY

SEQ ID NO: 355 - protein, 18 aa, Artificial Sequence
  Synthetically generated peptide
  VARIANT (3)..(4): Xaa = Any Amino Acid
  misc_feature (12)..(12): Xaa can be any naturally occurring amino acid
  misc_feature (16)..(16): Xaa can be any naturally occurring amino acid
CCXXEYCCNPAXCTGXCY

SEQ ID NO: 356 - protein, 18 aa, Artificial Sequence
  Synthetically generated peptide
  VARIANT (3)..(4): Xaa = Any Amino Acid
  misc_feature (12)..(12): Xaa can be any naturally occurring amino acid
  misc_feature (17)..(17): Xaa can be any naturally occurring amino acid
CCXXEYCCNPAXCTGCXY

SEQ ID NO: 357 - protein, 17 aa, Artificial Sequence
  Synthetically generated peptide
  VARIANT (3)..(4): Xaa = Any Amino Acid
  misc_feature (13)..(13): Xaa can be any naturally occurring amino acid
CCXXEYCCNPACXTGCY

SEQ ID NO: 358 - protein, 18 aa, Artificial Sequence
  Synthetically generated peptide
  VARIANT (3)..(4): Xaa = Any Amino Acid
  misc_feature (13)..(14): Xaa can be any naturally occurring amino acid
CCXXEYCCNPACXXTGCY

SEQ ID NO: 359 - protein, 18 aa, Artificial Sequence
  Synthetically generated peptide
  VARIANT (3)..(4): Xaa = Any Amino Acid
  misc_feature (13)..(13): Xaa can be any naturally occurring amino acid
  misc_feature (15)..(15): Xaa can be any naturally occurring amino acid
CCXXEYCCNPACXTXGCY

SEQ ID NO: 360 - protein, 18 aa, Artificial Sequence
  Synthetically generated peptide
  VARIANT (3)..(4): Xaa = Any Amino Acid
  misc_feature (13)..(13): Xaa can be any naturally occurring amino acid
  misc_feature (16)..(16): Xaa can be any naturally occurring amino acid
CCXXEYCCNPACXTGXCY

SEQ ID NO: 361 - protein, 18 aa, Artificial Sequence
  Synthetically generated peptide
  VARIANT (3)..(4): Xaa = Any Amino Acid
  misc_feature (13)..(13): Xaa can be any naturally occurring amino acid
  misc_feature (17)..(17): Xaa can be any naturally occurring amino acid
CCXXEYCCNPACXTGCXY

SEQ ID NO: 362 - protein, 17 aa, Artificial Sequence
  Synthetically generated peptide
  VARIANT (3)..(4): Xaa = Any Amino Acid
  misc_feature (14)..(14): Xaa can be any naturally occurring amino acid
CCXXEYCCNPACTXGCY

SEQ ID NO: 363 - protein, 18 aa, Artificial Sequence
  Synthetically generated peptide
  VARIANT (3)..(4): Xaa = Any Amino Acid
  misc_feature (14)..(15): Xaa can be any naturally occurring amino acid
CCXXEYCCNPACTXXGCY

SEQ ID NO: 364 - protein, 18 aa, Artificial Sequence
  Synthetically generated peptide
  VARIANT (3)..(4): Xaa = Any Amino Acid
  misc_feature (14)..(14): Xaa can be any naturally occurring amino acid
  misc_feature (16)..(16): Xaa can be any naturally occurring amino acid
CCXXEYCCNPACTXGXCY

SEQ ID NO: 365 - protein, 18 aa, Artificial Sequence
  Synthetically generated peptide
  VARIANT (3)..(4): Xaa = Any Amino Acid
  misc_feature (14)..(14): Xaa can be any naturally occurring amino acid
  misc_feature (17)..(17): Xaa can be any naturally occurring amino acid
CCXXEYCCNPACTXGCXY

SEQ ID NO: 366 - protein, 17 aa, Artificial Sequence
  Synthetically generated peptide
  VARIANT (3)..(4): Xaa = Any Amino Acid
  misc_feature (15)..(15): Xaa can be any naturally occurring amino acid
CCXXEYCCNPACTGXCY

SEQ ID NO: 367 - protein, 18 aa, Artificial Sequence
  Synthetically generated peptide
  VARIANT (3)..(4): Xaa = Any Amino Acid
  misc_feature (15)..(16): Xaa can be any naturally occurring amino acid
CCXXEYCCNPACTGXXCY

SEQ ID NO: 368 - protein, 18 aa, Artificial Sequence
  Synthetically generated peptide
  VARIANT (3)..(4): Xaa = Any Amino Acid
  misc_feature (15)..(15): Xaa can be any naturally occurring amino acid
  misc_feature (17)..(17): Xaa can be any naturally occurring amino acid
CCXXEYCCNPACTGXCXY

SEQ ID NO: 369 - protein, 17 aa, Artificial Sequence
  Synthetically generated peptide
  VARIANT (3)..(4): Xaa = Any Amino Acid
  misc_feature (16)..(16): Xaa can be any naturally occurring amino acid
CCXXEYCCNPACTGCXY

SEQ ID NO: 370 - protein, 18 aa, Artificial Sequence
  Synthetically generated peptide
  VARIANT (3)..(4): Xaa = Any Amino Acid
  misc_feature (16)..(17): Xaa can be any naturally occurring amino acid
CCXXEYCCNPACTGCXXY

SEQ ID NO: 371 - protein, 16 aa, Artificial Sequence
  Synthetically generated peptide
  VARIANT (3)..(5): Xaa = Any Amino Acid
CCXEXYCCNPACTGCY

SEQ ID NO: 372 - protein, 17 aa, Artificial Sequence
  Synthetically generated peptide
  VARIANT (3)..(5): Xaa = Any Amino Acid
  misc_feature (6)..(6): Xaa can be any naturally occurring amino acid
CCXEXXYCCNPACTGCY

SEQ ID NO: 373 - protein, 18 aa, Artificial Sequence
  Synthetically generated peptide
  VARIANT (3)..(5): Xaa = Any Amino Acid
  misc_feature (6)..(7): Xaa can be any naturally occurring amino acid
CCXEXXXYCCNPACTGCY

SEQ ID NO: 374 - protein, 18 aa, Artificial Sequence
  Synthetically generated peptide
  VARIANT (3)..(5): Xaa = Any Amino Acid
  misc_feature (6)..(6): Xaa can be any naturally occurring amino acid
  misc_feature (8)..(8): Xaa can be any naturally occurring amino acid
CCXEXXYXCCNPACTGCY

SEQ ID NO: 375 - protein, 18 aa, Artificial Sequence
  Synthetically generated peptide
  VARIANT (3)..(5): Xaa = Any Amino Acid
  misc_feature (6)..(6): Xaa can be any naturally occurring amino acid
  misc_feature (10)..(10): Xaa can be any naturally occurring amino acid
CCXEXXYCCXNPACTGCY

SEQ ID NO: 376 - protein, 18 aa, Artificial Sequence
  Synthetically generated peptide
  VARIANT (3)..(5): Xaa = Any Amino Acid
  misc_feature (6)..(6): Xaa can be any naturally occurring amino acid
  misc_feature (11)..(11): Xaa can be any naturally occurring amino acid
CCXEXXYCCNXPACTGCY

SEQ ID NO: 377 - protein, 18 aa, Artificial Sequence
  Synthetically generated peptide
  VARIANT (3)..(5): Xaa = Any Amino Acid
  misc_feature (6)..(6): Xaa can be any naturally occurring amino acid
  misc_feature (12)..(12): Xaa can be any naturally occurring amino acid
CCXEXXYCCNPXACTGCY

SEQ ID NO: 378 - protein, 18 aa, Artificial Sequence
  Synthetically generated peptide
  VARIANT (3)..(5): Xaa = Any Amino Acid
  misc_feature (6)..(6): Xaa can be any naturally occurring amino acid
  misc_feature (13)..(13): Xaa can be any naturally occurring amino acid
CCXEXXYCCNPAXCTGCY

SEQ ID NO: 379 - protein, 18 aa, Artificial Sequence
  Synthetically generated peptide
  VARIANT (3)..(5): Xaa = Any Amino Acid
  misc_feature (6)..(6): Xaa can be any naturally occurring amino acid
  misc_feature (14)..(14): Xaa can be any naturally occurring amino acid
CCXEXXYCCNPACXTGCY

SEQ ID NO: 380 - protein, 18 aa, Artificial Sequence
  Synthetically generated peptide
  VARIANT (3)..(5): Xaa = Any Amino Acid
  misc_feature (6)..(6): Xaa can be any naturally occurring amino acid
  misc_feature (15)..(15): Xaa can be any naturally occurring amino acid
CCXEXXYCCNPACTXGCY

SEQ ID NO: 381 - protein, 18 aa, Artificial Sequence
  Synthetically generated peptide
  VARIANT (3)..(5): Xaa = Any Amino Acid
  misc_feature (6)..(6): Xaa can be any naturally occurring amino acid
  misc_feature (16)..(16): Xaa can be any naturally occurring amino acid
CCXEXXYCCNPACTGXCY

SEQ ID NO: 382 - protein, 18 aa, Artificial Sequence
  Synthetically generated peptide
  VARIANT (3)..(5): Xaa = Any Amino Acid
  misc_feature (6)..(6): Xaa can be any naturally occurring amino acid
  misc_feature (17)..(17): Xaa can be any naturally occurring amino acid
CCXEXXYCCNPACTGCXY

SEQ ID NO: 383 - protein, 17 aa, Artificial Sequence
  Synthetically generated peptide
  VARIANT (3)..(5): Xaa = Any Amino Acid
  misc_feature (7)..(7): Xaa can be any naturally occurring amino acid
CCXEXYXCCNPACTGCY

SEQ ID NO: 384 - protein, 18 aa, Artificial Sequence
  Synthetically generated peptide
  VARIANT (3)..(5): Xaa = Any Amino Acid
  misc_feature (7)..(8): Xaa can be any naturally occurring amino acid
CCXEXYXXCCNPACTGCY

SEQ ID NO: 385 - protein, 18 aa, Artificial Sequence
  Synthetically generated peptide
  VARIANT (3)..(5): Xaa = Any Amino Acid
  misc_feature (7)..(7): Xaa can be any naturally occurring amino acid
  misc_feature (10)..(10): Xaa can be any naturally occurring amino acid
CCXEXYXCCXNPACTGCY

SEQ ID NO: 386 - protein, 18 aa, Artificial Sequence
  Synthetically generated peptide
  VARIANT (3)..(5): Xaa = Any Amino Acid
  misc_feature (7)..(7): Xaa can be any naturally occurring amino acid
  misc_feature (11)..(11): Xaa can be any naturally occurring amino acid
CCXEXYXCCNXPACTGCY

SEQ ID NO: 387 - protein, 18 aa, Artificial Sequence
  Synthetically generated peptide
  VARIANT (3)..(5): Xaa = Any Amino Acid
  misc_feature (7)..(7): Xaa can be any naturally occurring amino acid
  misc_feature (12)..(12): Xaa can be any naturally occurring amino acid
CCXEXYXCCNPXACTGCY

SEQ ID NO: 388 - protein, 18 aa, Artificial Sequence
  Synthetically generated peptide
  VARIANT (3)..(5): Xaa = Any Amino Acid
  misc_feature (7)..(7): Xaa can be any naturally occurring amino acid
  misc_feature (13)..(13): Xaa can be any naturally occurring amino acid
CCXEXYXCCNPAXCTGCY

SEQ ID NO: 389 - protein, 18 aa, Artificial Sequence
  Synthetically generated peptide
  VARIANT (3)..(5): Xaa = Any Amino Acid
  misc_feature (7)..(7): Xaa can be any naturally occurring amino acid
  misc_feature (14)..(14): Xaa can be any naturally occurring amino acid
CCXEXYXCCNPACXTGCY

SEQ ID NO: 390 - protein, 18 aa, Artificial Sequence
  Synthetically generated peptide
  VARIANT (3)..(5): Xaa = Any Amino Acid
  misc_feature (7)..(7): Xaa can be any naturally occurring amino acid
  misc_feature (15)..(15): Xaa can be any naturally occurring amino acid
CCXEXYXCCNPACTXGCY

SEQ ID NO: 391 - protein, 18 aa, Artificial Sequence
  Synthetically generated peptide
  VARIANT (3)..(5): Xaa = Any Amino Acid
  misc_feature (7)..(7): Xaa can be any naturally occurring amino acid
  misc_feature (16)..(16): Xaa can be any naturally occurring amino acid
CCXEXYXCCNPACTGXCY

SEQ ID NO: 392 - protein, 18 aa, Artificial Sequence
  Synthetically generated peptide
  VARIANT (3)..(5): Xaa = Any Amino Acid
  misc_feature (7)..(7): Xaa can be any naturally occurring amino acid
  misc_feature (17)..(17): Xaa can be any naturally occurring amino acid
CCXEXYXCCNPACTGCXY

SEQ ID NO: 393 - protein, 17 aa, Artificial Sequence
  Synthetically generated peptide
  VARIANT (3)..(5): Xaa = Any Amino Acid
  misc_feature (9)..(9): Xaa can be any naturally occurring amino acid
CCXEXYCCXNPACTGCY

SEQ ID NO: 394 - protein, 18 aa, Artificial Sequence
  Synthetically generated peptide
  VARIANT (3)..(5): Xaa = Any Amino Acid
  misc_feature (9)..(10): Xaa can be any naturally occurring amino acid
CCXEXYCCXXNPACTGCY

SEQ ID NO: 395 - protein, 18 aa, Artificial Sequence
  Synthetically generated peptide
  VARIANT (3)..(5): Xaa = Any Amino Acid
  misc_feature (9)..(9): Xaa can be any naturally occurring amino acid
  misc_feature (11)..(11): Xaa can be any naturally occurring amino acid
CCXEXYCCXNXPACTGCY

SEQ ID NO: 396 - protein, 18 aa, Artificial Sequence
  Synthetically generated peptide
  VARIANT (3)..(5): Xaa = Any Amino Acid
  misc_feature (9)..(9): Xaa can be any naturally occurring amino acid
  misc_feature (12)..(12): Xaa can be any naturally occurring amino acid
CCXEXYCCXNPXACTGCY

SEQ ID NO: 397 - protein, 18 aa, Artificial Sequence
  Synthetically generated peptide
  VARIANT (3)..(5): Xaa = Any Amino Acid
  misc_feature (9)..(9): Xaa can be any naturally occurring amino acid
  misc_feature (13)..(13): Xaa can be any naturally occurring amino acid
CCXEXYCCXNPAXCTGCY

SEQ ID NO: 398 - protein, 18 aa, Artificial Sequence
  Synthetically generated peptide
  VARIANT (3)..(5): Xaa = Any Amino Acid
  misc_feature (9)..(9): Xaa can be any naturally occurring amino acid
  misc_feature (14)..(14): Xaa can be any naturally occurring amino acid
CCXEXYCCXNPACXTGCY

SEQ ID NO: 399 - protein, 18 aa, Artificial Sequence
  Synthetically generated peptide
  VARIANT (3)..(5): Xaa = Any Amino Acid
  misc_feature (9)..(9): Xaa can be any naturally occurring amino acid
  misc_feature (15)..(15): Xaa can be any naturally occurring amino acid
CCXEXYCCXNPACTXGCY

SEQ ID NO: 400 - protein, 18 aa, Artificial Sequence
  Synthetically generated peptide
  VARIANT (3)..(5): Xaa = Any Amino Acid
  misc_feature (9)..(9): Xaa can be any naturally occurring amino acid
  misc_feature (16)..(16): Xaa can be any naturally occurring amino acid
CCXEXYCCXNPACTGXCY

SEQ ID NO: 401 - protein, 18 aa, Artificial Sequence
  Synthetically generated peptide
  VARIANT (3)..(5): Xaa = Any Amino Acid
  misc_feature (9)..(9): Xaa can be any naturally occurring amino acid
  misc_feature (17)..(17): Xaa can be any naturally occurring amino acid
CCXEXYCCXNPACTGCXY

SEQ ID NO: 402 - protein, 17 aa, Artificial Sequence
  Synthetically generated peptide
  VARIANT (3)..(5): Xaa = Any Amino Acid
  misc_feature (10)..(10): Xaa can be any naturally occurring amino acid
CCXEXYCCNXPACTGCY

SEQ ID NO: 403 - protein, 18 aa, Artificial Sequence
  Synthetically generated peptide
  VARIANT (3)..(5): Xaa = Any Amino Acid
  misc_feature (10)..(11): Xaa can be any naturally occurring amino acid
CCXEXYCCNXXPACTGCY

SEQ ID NO: 404 - protein, 18 aa, Artificial Sequence
  Synthetically generated peptide
  VARIANT (3)..(5): Xaa = Any Amino Acid
  misc_feature (10)..(10): Xaa can be any naturally occurring amino acid
  misc_feature (12)..(12): Xaa can be any naturally occurring amino acid
CCXEXYCCNXPXACTGCY

SEQ ID NO: 405 - protein, 18 aa, Artificial Sequence
  Synthetically generated peptide
  VARIANT (3)..(5): Xaa = Any Amino Acid
  misc_feature (10)..(10): Xaa can be any naturally occurring amino acid
  misc_feature (13)..(13): Xaa can be any naturally occurring amino acid
CCXEXYCCNXPAXCTGCY

SEQ ID NO: 406 - protein, 18 aa, Artificial Sequence
  Synthetically generated peptide
  VARIANT (3)..(5): Xaa = Any Amino Acid
  misc_feature (10)..(10): Xaa can be any naturally occurring amino acid
  misc_feature (14)..(14): Xaa can be any naturally occurring amino acid
CCXEXYCCNXPACXTGCY

SEQ ID NO: 407 - protein, 18 aa, Artificial Sequence
  Synthetically generated peptide
  VARIANT (3)..(5): Xaa = Any Amino Acid
  misc_feature (10)..(10): Xaa can be any naturally occurring amino acid
  misc_feature (15)..(15): Xaa can be any naturally occurring amino acid
CCXEXYCCNXPACTXGCY

SEQ ID NO: 408 - protein, 18 aa, Artificial Sequence
  Synthetically generated peptide
  VARIANT (3)..(5): Xaa = Any Amino Acid
  misc_feature (10)..(10): Xaa can be any naturally occurring amino acid
  misc_feature (16)..(16): Xaa can be any naturally occurring amino acid
CCXEXYCCNXPACTGXCY

SEQ ID NO: 409 - protein, 18 aa, Artificial Sequence
  Synthetically generated peptide
  VARIANT (3)..(5): Xaa = Any Amino Acid
  misc_feature (10)..(10): Xaa can be any naturally occurring amino acid
  misc_feature (17)..(17): Xaa can be any naturally occurring amino acid
CCXEXYCCNXPACTGCXY

SEQ ID NO: 410 - protein, 17 aa, Artificial Sequence
  Synthetically generated peptide
  VARIANT (3)..(5): Xaa = Any Amino Acid
  misc_feature (11)..(11): Xaa can be any naturally occurring amino acid
CCXEXYCCNPXACTGCY

SEQ ID NO: 411 - protein, 18 aa, Artificial Sequence
  Synthetically generated peptide
  VARIANT (3)..(5): Xaa = Any Amino Acid
  misc_feature (11)..(12): Xaa can be any naturally occurring amino acid
CCXEXYCCNPXXACTGCY

SEQ ID NO: 412 - protein, 18 aa, Artificial Sequence
  Synthetically generated peptide
  VARIANT (3)..(5): Xaa = Any Amino Acid
  misc_feature (11)..(11): Xaa can be any naturally occurring amino acid
  misc_feature (13)..(13): Xaa can be any naturally occurring amino acid
CCXEXYCCNPXAXCTGCY

SEQ ID NO: 413 - protein, 18 aa, Artificial Sequence
  Synthetically generated peptide
  VARIANT (3)..(5): Xaa = Any Amino Acid
  misc_feature (11)..(11): Xaa can be any naturally occurring amino acid
  misc_feature (14)..(14): Xaa can be any naturally occurring amino acid
CCXEXYCCNPXACXTGCY

SEQ ID NO: 414 - protein, 18 aa, Artificial Sequence
  Synthetically generated peptide
  VARIANT (3)..(5): Xaa = Any Amino Acid
  misc_feature (11)..(11): Xaa can be any naturally occurring amino acid
  misc_feature (15)..(15): Xaa can be any naturally occurring amino acid
CCXEXYCCNPXACTXGCY

SEQ ID NO: 415 - protein, 18 aa, Artificial Sequence
  Synthetically generated peptide
  VARIANT (3)..(5): Xaa = Any Amino Acid
  misc_feature (11)..(11): Xaa can be any naturally occurring amino acid
  misc_feature (16)..(16): Xaa can be any naturally occurring amino acid
CCXEXYCCNPXACTGXCY

SEQ ID NO: 416 - protein, 18 aa, Artificial Sequence
  Synthetically generated peptide
  VARIANT (3)..(5): Xaa = Any Amino Acid
  misc_feature (11)..(11): Xaa can be any naturally occurring amino acid
  misc_feature (17)..(17): Xaa can be any naturally occurring amino acid
CCXEXYCCNPXACTGCXY

SEQ ID NO: 417 - protein, 17 aa, Artificial Sequence
  Synthetically generated peptide
  VARIANT (3)..(5): Xaa = Any Amino Acid
  misc_feature (12)..(12): Xaa can be any naturally occurring amino acid
CCXEXYCCNPAXCTGCY

SEQ ID NO: 418 - protein, 18 aa, Artificial Sequence
  Synthetically generated peptide
  VARIANT (3)..(5): Xaa = Any Amino Acid
  misc_feature (12)..(13): Xaa can be any naturally occurring amino acid
CCXEXYCCNPAXXCTGCY

SEQ ID NO: 419 - protein, 18 aa, Artificial Sequence
  Synthetically generated peptide
  VARIANT (3)..(5): Xaa = Any Amino Acid
  misc_feature (12)..(12): Xaa can be any naturally occurring amino acid
  misc_feature (14)..(14): Xaa can be any naturally occurring amino acid
CCXEXYCCNPAXCXTGCY

SEQ ID NO: 420 - protein, 18 aa, Artificial Sequence
  Synthetically generated peptide
  VARIANT (3)..(5): Xaa = Any Amino Acid
  misc_feature (12)..(12): Xaa can be any naturally occurring amino acid
  misc_feature (15)..(15): Xaa can be any naturally occurring amino acid
CCXEXYCCNPAXCTXGCY

SEQ ID NO: 421 - protein, 18 aa, Artificial Sequence
  Synthetically generated peptide
  VARIANT (3)..(5): Xaa = Any Amino Acid
  misc_feature (12)..(12): Xaa can be any naturally occurring amino acid
  misc_feature (16)..(16): Xaa can be any naturally occurring amino acid
CCXEXYCCNPAXCTGXCY

SEQ ID NO: 422 - protein, 18 aa, Artificial Sequence
  Synthetically generated peptide
  VARIANT (3)..(5): Xaa = Any Amino Acid
  misc_feature (12)..(12): Xaa can be any naturally occurring amino acid
  misc_feature (17)..(17): Xaa can be any naturally occurring amino acid
CCXEXYCCNPAXCTGCXY

SEQ ID NO: 423 - protein, 17 aa, Artificial Sequence
  Synthetically generated peptide
  VARIANT (3)..(5): Xaa = Any Amino Acid
  misc_feature (13)..(13): Xaa can be any naturally occurring amino acid
CCXEXYCCNPACXTGCY

SEQ ID NO: 424 - protein, 18 aa, Artificial Sequence
  Synthetically generated peptide
  VARIANT (3)..(5): Xaa = Any Amino Acid
  misc_feature (13)..(14): Xaa can be any naturally occurring amino acid
CCXEXYCCNPACXXTGCY

SEQ ID NO: 425 - protein, 18 aa, Artificial Sequence
  Synthetically generated peptide
  VARIANT (1)..(18): Xaa = Any Amino Acid
  VARIANT (3)..(5): Xaa = Any Amino Acid
CCXEXYCCNPACXTXGCY

SEQ ID NO: 426 - protein, 18 aa, Artificial Sequence
  Synthetically generated peptide
  VARIANT (3)..(5): Xaa = Any Amino Acid
  misc_feature (13)..(13): Xaa can be any naturally occurring amino acid
  misc_feature (16)..(16): Xaa can be any naturally occurring amino acid
CCXEXYCCNPACXTGXCY

SEQ ID NO: 427 - protein, 18 aa, Artificial Sequence
  Synthetically generated peptide
  VARIANT (3)..(5): Xaa = Any Amino Acid
  misc_feature (13)..(13): Xaa can be any naturally occurring amino acid
  misc_feature (17)..(17): Xaa can be any naturally occurring amino acid
CCXEXYCCNPACXTGCXY

SEQ ID NO: 428 - protein, 17 aa, Artificial Sequence
  Synthetically generated peptide
  VARIANT (3)..(5): Xaa = Any Amino Acid
  misc_feature (14)..(14): Xaa can be any naturally occurring amino acid
CCXEXYCCNPACTXGCY

SEQ ID NO: 429 - protein, 18 aa, Artificial Sequence
  Synthetically generated peptide
  VARIANT (3)..(5): Xaa = Any Amino Acid
  misc_feature (14)..(15): Xaa can be any naturally occurring amino acid
CCXEXYCCNPACTXXGCY

SEQ ID NO: 430 - protein, 18 aa, Artificial Sequence
  Synthetically generated peptide
  VARIANT (3)..(5): Xaa = Any Amino Acid
  misc_feature (14)..(14): Xaa can be any naturally occurring amino acid
  misc_feature (16)..(16): Xaa can be any naturally occurring amino acid
CCXEXYCCNPACTXGXCY

SEQ ID NO: 431 - protein, 18 aa, Artificial Sequence
  Synthetically generated peptide
  VARIANT (3)..(5): Xaa = Any Amino Acid
  misc_feature (14)..(14): Xaa can be any naturally occurring amino acid
  misc_feature (17)..(17): Xaa can be any naturally occurring amino acid
CCXEXYCCNPACTXGCXY

SEQ ID NO: 432 - protein, 17 aa, Artificial Sequence
  Synthetically generated peptide
  VARIANT (3)..(5): Xaa = Any Amino Acid
  misc_feature (15)..(15): Xaa can be any naturally occurring amino acid
CCXEXYCCNPACTGXCY

SEQ ID NO: 433 - protein, 18 aa, Artificial Sequence
  Synthetically generated peptide
  VARIANT (3)..(5): Xaa = Any Amino Acid
  misc_feature (15)..(16): Xaa can be any naturally occurring amino acid
CCXEXYCCNPACTGXXCY

SEQ ID NO: 434 - protein, 18 aa, Artificial Sequence
  Synthetically generated peptide
  VARIANT (3)..(5): Xaa = Any Amino Acid
  misc_feature (15)..(15): Xaa can be any naturally occurring amino acid
  misc_feature (17)..(17): Xaa can be any naturally occurring amino acid
CCXEXYCCNPACTGXCXY

SEQ ID NO: 435 - protein, 17 aa, Artificial Sequence
  Synthetically generated peptide
  VARIANT (3)..(5): Xaa = Any Amino Acid
  misc_feature (16)..(16): Xaa can be any naturally occurring amino acid
CCXEXYCCNPACTGCXY

SEQ ID NO: 436 - protein, 18 aa, Artificial Sequence
  Synthetically generated peptide
  VARIANT (3)..(5): Xaa = Any Amino Acid
  misc_feature (16)..(17): Xaa can be any naturally occurring amino acid
CCXEXYCCNPACTGCXXY

SEQ ID NO: 437 - protein, 16 aa, Artificial Sequence
  Synthetically generated peptide
  VARIANT (3)..(6): Xaa = Any Amino Acid
CCXEYXCCNPACTGCY

SEQ ID NO: 438 - protein, 17 aa, Artificial Sequence
  Synthetically generated peptide
  VARIANT (3)..(6): Xaa = Any Amino Acid
  misc_feature (7)..(7): Xaa can be any naturally occurring amino acid
CCXEYXXCCNPACTGCY

SEQ ID NO: 439 - protein, 18 aa, Artificial Sequence
  Synthetically generated peptide
  VARIANT (3)..(6): Xaa = Any Amino Acid
  misc_feature (7)..(8): Xaa can be any naturally occurring amino acid
CCXEYXXXCCNPACTGCY

SEQ ID NO: 440 - protein, 18 aa, Artificial Sequence
  Synthetically generated peptide
  VARIANT (3)..(6): Xaa = Any Amino Acid
  misc_feature (7)..(7): Xaa can be any naturally occurring amino acid
  misc_feature (10)..(10): Xaa can be any naturally occurring amino acid
CCXEYXXCCXNPACTGCY

SEQ ID NO: 441 - protein, 18 aa, Artificial Sequence
  Synthetically generated peptide
  VARIANT (3)..(6): Xaa = Any Amino Acid
  misc_feature (7)..(7): Xaa can be any naturally occurring amino acid
  misc_feature (11)..(11): Xaa can be any naturally occurring amino acid
CCXEYXXCCNXPACTGCY

SEQ ID NO: 442 - protein, 18 aa, Artificial Sequence
  Synthetically generated peptide
  VARIANT (3)..(6): Xaa = Any Amino Acid
  misc_feature (7)..(7): Xaa can be any naturally occurring amino acid
  misc_feature (12)..(12): Xaa can be any naturally occurring amino acid
CCXEYXXCCNPXACTGCY

SEQ ID NO: 443 - protein, 18 aa, Artificial Sequence
  Synthetically generated peptide
  VARIANT (3)..(6): Xaa = Any Amino Acid
  misc_feature (7)..(7): Xaa can be any naturally occurring amino acid
  misc_feature (13)..(13): Xaa can be any naturally occurring amino acid
CCXEYXXCCNPAXCTGCY

SEQ ID NO: 444 - protein, 18 aa, Artificial Sequence
  Synthetically generated peptide
  VARIANT (3)..(6): Xaa = Any Amino Acid
  misc_feature (7)..(7): Xaa can be any naturally occurring amino acid
  misc_feature (14)..(14): Xaa can be any naturally occurring amino acid
CCXEYXXCCNPACXTGCY

SEQ ID NO: 445 - protein, 18 aa, Artificial Sequence
  Synthetically generated peptide
  VARIANT (3)..(6): Xaa = Any Amino Acid
  misc_feature (7)..(7): Xaa can be any naturally occurring amino acid
  misc_feature (15)..(15): Xaa can be any naturally occurring amino acid
CCXEYXXCCNPACTXGCY

SEQ ID NO: 446 - protein, 18 aa, Artificial Sequence
  Synthetically generated peptide
  VARIANT (3)..(6): Xaa = Any Amino Acid
  misc_feature (7)..(7): Xaa can be any naturally occurring amino acid
  misc_feature (16)..(16): Xaa can be any naturally occurring amino acid
CCXEYXXCCNPACTGXCY

SEQ ID NO: 447 - protein, 18 aa, Artificial Sequence
  Synthetically generated peptide
  VARIANT (3)..(6): Xaa = Any Amino Acid
  misc_feature (7)..(7): Xaa can be any naturally occurring amino acid
  misc_feature (17)..(17): Xaa can be any naturally occurring amino acid
CCXEYXXCCNPACTGCXY

SEQ ID NO: 448 - protein, 17 aa, Artificial Sequence
  Synthetically generated peptide
  VARIANT (3)..(6): Xaa = Any Amino Acid
  misc_feature (9)..(9): Xaa can be any naturally occurring amino acid
CCXEYXCCXNPACTGCY

SEQ ID NO: 449 - protein, 18 aa, Artificial Sequence
  Synthetically generated peptide
  VARIANT (3)..(6): Xaa = Any Amino Acid
  misc_feature (9)..(10): Xaa can be any naturally occurring amino acid
CCXEYXCCXXNPACTGCY

SEQ ID NO: 450 - protein, 18 aa, Artificial Sequence
  Synthetically generated peptide
  VARIANT (3)..(6): Xaa = Any Amino Acid
  misc_feature (9)..(9): Xaa can be any naturally occurring amino acid
  misc_feature (11)..(11): Xaa can be any naturally occurring amino acid
CCXEYXCCXNXPACTGCY

SEQ ID NO: 451 - protein, 18 aa, Artificial Sequence
  Synthetically generated peptide
  VARIANT (3)..(6): Xaa = Any Amino Acid
  misc_feature (9)..(9): Xaa can be any naturally occurring amino acid
  misc_feature (12)..(12): Xaa can be any naturally occurring amino acid
CCXEYXCCXNPXACTGCY

SEQ ID NO: 452 - protein, 18 aa, Artificial Sequence
  Synthetically generated peptide
  VARIANT (3)..(6): Xaa = Any Amino Acid
  misc_feature (9)..(9): Xaa can be any naturally occurring amino acid
  misc_feature (13)..(13): Xaa can be any naturally occurring amino acid
CCXEYXCCXNPAXCTGCY

SEQ ID NO: 453 - protein, 18 aa, Artificial Sequence
  Synthetically generated peptide
  VARIANT (3)..(6): Xaa = Any Amino Acid
  misc_feature (9)..(9): Xaa can be any naturally occurring amino acid
  misc_feature (14)..(14): Xaa can be any naturally occurring amino acid
CCXEYXCCXNPACXTGCY

SEQ ID NO: 454 - protein, 18 aa, Artificial Sequence
  Synthetically generated peptide
  VARIANT (3)..(6): Xaa = Any Amino Acid
  misc_feature (9)..(9): Xaa can be any naturally occurring amino acid
  misc_feature (15)..(15): Xaa can be any naturally occurring amino acid
CCXEYXCCXNPACTXGCY

SEQ ID NO: 455 - protein, 18 aa, Artificial Sequence
  Synthetically generated peptide
  VARIANT (3)..(6): Xaa = Any Amino Acid
  misc_feature (9)..(9): Xaa can be any naturally occurring amino acid
  misc_feature (16)..(16): Xaa can be any naturally occurring amino acid
CCXEYXCCXNPACTGXCY

SEQ ID NO: 456 - protein, 18 aa, Artificial Sequence
  Synthetically generated peptide
  VARIANT (3)..(6): Xaa = Any Amino Acid
  misc_feature (9)..(9): Xaa can be any naturally occurring amino acid
  misc_feature (17)..(17): Xaa can be any naturally occurring amino acid
CCXEYXCCXNPACTGCXY

SEQ ID NO: 457 - protein, 17 aa, Artificial Sequence
  Synthetically generated peptide
  VARIANT (3)..(6): Xaa = Any Amino Acid
  misc_feature (10)..(10): Xaa can be any naturally occurring amino acid
CCXEYXCCNXPACTGCY

SEQ ID NO: 458 - protein, 18 aa, Artificial Sequence
  Synthetically generated peptide
  VARIANT (3)..(6): Xaa = Any Amino Acid
  misc_feature (10)..(11): Xaa can be any naturally occurring amino acid
CCXEYXCCNXXPACTGCY

SEQ ID NO: 459 - protein, 18 aa, Artificial Sequence
  Synthetically generated peptide
  VARIANT (3)..(6): Xaa = Any Amino Acid
  misc_feature (10)..(10): Xaa can be any naturally occurring amino acid
  misc_feature (12)..(12): Xaa can be any naturally occurring amino acid
CCXEYXCCNXPXACTGCY

SEQ ID NO: 460 - protein, 18 aa, Artificial Sequence
  Synthetically generated peptide
  VARIANT (3)..(6): Xaa = Any Amino Acid
  misc_feature (10)..(10): Xaa can be any naturally occurring amino acid
  misc_feature (13)..(13): Xaa can be any naturally occurring amino acid
CCXEYXCCNXPAXCTGCY

SEQ ID NO: 461 - protein, 18 aa, Artificial Sequence
  Synthetically generated peptide
  VARIANT (3)..(6): Xaa = Any Amino Acid
  misc_feature (10)..(10): Xaa can be any naturally occurring amino acid
  misc_feature (14)..(14): Xaa can be any naturally occurring amino acid
CCXEYXCCNXPACXTGCY

SEQ ID NO: 462 - protein, 18 aa, Artificial Sequence
  Synthetically generated peptide
  VARIANT (3)..(6): Xaa = Any Amino Acid
  misc_feature (10)..(10): Xaa can be any naturally occurring amino acid
  misc_feature (15)..(15): Xaa can be any naturally occurring amino acid
CCXEYXCCNXPACTXGCY

SEQ ID NO: 463 - protein, 18 aa, Artificial Sequence
  Synthetically generated peptide
  VARIANT (3)..(6): Xaa = Any Amino Acid
  misc_feature (10)..(10): Xaa can be any naturally occurring amino acid
  misc_feature (16)..(16): Xaa can be any naturally occurring amino acid
CCXEYXCCNXPACTGXCY

SEQ ID NO: 464 - protein, 18 aa, Artificial Sequence
  Synthetically generated peptide
  VARIANT (3)..(6): Xaa = Any Amino Acid
  misc_feature (10)..(10): Xaa can be any naturally occurring amino acid
  misc_feature (17)..(17): Xaa can be any naturally occurring amino acid
CCXEYXCCNXPACTGCXY

SEQ ID NO: 465 - protein, 17 aa, Artificial Sequence
  Synthetically generated peptide
  VARIANT (3)..(6): Xaa = Any Amino Acid
  misc_feature (11)..(11): Xaa can be any naturally occurring amino acid
CCXEYXCCNPXACTGCY

SEQ ID NO: 466 - protein, 18 aa, Artificial Sequence
  Synthetically generated peptide
  VARIANT (3)..(6): Xaa = Any Amino Acid
  misc_feature (11)..(12): Xaa can be any naturally occurring amino acid
CCXEYXCCNPXXACTGCY

SEQ ID NO: 467 - protein, 18 aa, Artificial Sequence
  Synthetically generated peptide
  VARIANT (3)..(6): Xaa = Any Amino Acid
  misc_feature (11)..(11): Xaa can be any naturally occurring amino acid
  misc_feature (13)..(13): Xaa can be any naturally occurring amino acid
CCXEYXCCNPXAXCTGCY

SEQ ID NO: 468 - protein, 18 aa, Artificial Sequence
  Synthetically generated peptide
  VARIANT (3)..(6): Xaa = Any Amino Acid
  misc_feature (11)..(11): Xaa can be any naturally occurring amino acid
  misc_feature (14)..(14): Xaa can be any naturally occurring amino acid
CCXEYXCCNPXACXTGCY

SEQ ID NO: 469 - protein, 18 aa, Artificial Sequence
  Synthetically generated peptide
  VARIANT (3)..(6): Xaa = Any Amino Acid
  misc_feature (11)..(11): Xaa can be any naturally occurring amino acid
  misc_feature (15)..(15): Xaa can be any naturally occurring amino acid
CCXEYXCCNPXACTXGCY

SEQ ID NO: 470 - protein, 18 aa, Artificial Sequence
  Synthetically generated peptide
  VARIANT (3)..(6): Xaa = Any Amino Acid
  misc_feature (11)..(11): Xaa can be any naturally occurring amino acid
  misc_feature (16)..(16): Xaa can be any naturally occurring amino acid
CCXEYXCCNPXACTGXCY

SEQ ID NO: 471 - protein, 18 aa, Artificial Sequence
  Synthetically generated peptide
  VARIANT (3)..(6): Xaa = Any Amino Acid
  misc_feature (11)..(11): Xaa can be any naturally occurring amino acid
  misc_feature (17)..(17): Xaa can be any naturally occurring amino acid
CCXEYXCCNPXACTGCXY

SEQ ID NO: 472 - protein, 17 aa, Artificial Sequence
  Synthetically generated peptide
  VARIANT (3)..(6): Xaa = Any Amino Acid
  misc_feature (12)..(12): Xaa can be any naturally occurring amino acid
CCXEYXCCNPAXCTGCY

SEQ ID NO: 473 - protein, 18 aa, Artificial Sequence
  Synthetically generated peptide
  VARIANT (3)..(6): Xaa = Any Amino Acid
  misc_feature (12)..(13): Xaa can be any naturally occurring amino acid
CCXEYXCCNPAXXCTGCY

SEQ ID NO: 474 - protein, 18 aa, Artificial Sequence
  Synthetically generated peptide
  VARIANT (3)..(6): Xaa = Any Amino Acid
  misc_feature (12)..(12): Xaa can be any naturally occurring amino acid
  misc_feature (14)..(14): Xaa can be any naturally occurring amino acid
CCXEYXCCNPAXCXTGCY

SEQ ID NO: 475 - protein, 18 aa, Artificial Sequence
  Synthetically generated peptide
  VARIANT (3)..(6): Xaa = Any Amino Acid
  misc_feature (12)..(12): Xaa can be any naturally occurring amino acid
  misc_feature (15)..(15): Xaa can be any naturally occurring amino acid
CCXEYXCCNPAXCTXGCY

SEQ ID NO: 476 - protein, 18 aa, Artificial Sequence
  Synthetically generated peptide
  VARIANT (3)..(6): Xaa = Any Amino Acid
  misc_feature (12)..(12): Xaa can be any naturally occurring amino acid
  misc_feature (16)..(16): Xaa can be any naturally occurring amino acid
CCXEYXCCNPAXCTGXCY

SEQ ID NO: 477 - protein, 18 aa, Artificial Sequence
  Synthetically generated peptide
  VARIANT (3)..(6): Xaa = Any Amino Acid
  misc_feature (12)..(12): Xaa can be any naturally occurring amino acid
  misc_feature (17)..(17): Xaa can be any naturally occurring amino acid
CCXEYXCCNPAXCTGCXY

SEQ ID NO: 478 - protein, 17 aa, Artificial Sequence
  Synthetically generated peptide
  VARIANT (3)..(6): Xaa = Any Amino Acid
  misc_feature (13)..(13): Xaa can be any naturally occurring amino acid
CCXEYXCCNPACXTGCY

SEQ ID NO: 479 - protein, 18 aa, Artificial Sequence
  Synthetically generated peptide
  VARIANT (3)..(6): Xaa = Any Amino Acid
  misc_feature (13)..(14): Xaa can be any naturally occurring amino acid
CCXEYXCCNPACXXTGCY

SEQ ID NO: 480 - protein, 18 aa, Artificial Sequence
  Synthetically generated peptide
  VARIANT (3)..(6): Xaa = Any Amino Acid
  misc_feature (13)..(13): Xaa can be any naturally occurring amino acid
  misc_feature (15)..(15): Xaa can be any naturally occurring amino acid
CCXEYXCCNPACXTXGCY

SEQ ID NO: 481 - protein, 18 aa, Artificial Sequence
  Synthetically generated peptide
  VARIANT (3)..(6): Xaa = Any Amino Acid
  misc_feature (13)..(13): Xaa can be any naturally occurring amino acid
  misc_feature (16)..(16): Xaa can be any naturally occurring amino acid
CCXEYXCCNPACXTGXCY

SEQ ID NO: 482 - protein, 18 aa, Artificial Sequence
  Synthetically generated peptide
  VARIANT (3)..(6): Xaa = Any Amino Acid
  misc_feature (13)..(13): Xaa can be any naturally occurring amino acid
  misc_feature (17)..(17): Xaa can be any naturally occurring amino acid
CCXEYXCCNPACXTGCXY

SEQ ID NO: 483 - protein, 17 aa, Artificial Sequence
  Synthetically generated peptide
  VARIANT (3)..(6): Xaa = Any Amino Acid
  misc_feature (14)..(14): Xaa can be any naturally occurring amino acid
CCXEYXCCNPACTXGCY

SEQ ID NO: 484 - protein, 18 aa, Artificial Sequence
  Synthetically generated peptide
  VARIANT (3)..(6): Xaa = Any Amino Acid
  misc_feature (14)..(15): Xaa can be any naturally occurring amino acid
CCXEYXCCNPACTXXGCY

SEQ ID NO: 485 - protein, 18 aa, Artificial Sequence
  Synthetically generated peptide
  VARIANT (3)..(6): Xaa = Any Amino Acid
  misc_feature (14)..(14): Xaa can be any naturally occurring amino acid
  misc_feature (16)..(16): Xaa can be any naturally occurring amino acid
CCXEYXCCNPACTXGXCY

SEQ ID NO: 486 - protein, 18 aa, Artificial Sequence
  Synthetically generated peptide
  VARIANT (3)..(6): Xaa = Any Amino Acid
  misc_feature (14)..(14): Xaa can be any naturally occurring amino acid
  misc_feature (17)..(17): Xaa can be any naturally occurring amino acid
CCXEYXCCNPACTXGCXY

SEQ ID NO: 487 - protein, 17 aa, Artificial Sequence
  Synthetically generated peptide
  VARIANT (3)..(6): Xaa = Any Amino Acid
  misc_feature (15)..(15): Xaa can be any naturally occurring amino acid
CCXEYXCCNPACTGXCY

SEQ ID NO: 488 - protein, 18 aa, Artificial Sequence
  Synthetically generated peptide
  VARIANT (3)..(6): Xaa = Any Amino Acid
  misc_feature (15)..(16): Xaa can be any naturally occurring amino acid
CCXEYXCCNPACTGXXCY

SEQ ID NO: 489 - protein, 18 aa, Artificial Sequence
  Synthetically generated peptide
  VARIANT (3)..(6): Xaa = Any Amino Acid
  misc_feature (15)..(15): Xaa can be any naturally occurring amino acid
  misc_feature (17)..(17): Xaa can be any naturally occurring amino acid
CCXEYXCCNPACTGXCXY

SEQ ID NO: 490 - protein, 17 aa, Artificial Sequence
  Synthetically generated peptide
  VARIANT (3)..(6): Xaa = Any Amino Acid
  misc_feature (16)..(16): Xaa can be any naturally occurring amino acid
CCXEYXCCNPACTGCXY

SEQ ID NO: 491 - protein, 18 aa, Artificial Sequence
  Synthetically generated peptide
  VARIANT (3)..(6): Xaa = Any Amino Acid
  misc_feature (16)..(17): Xaa can be any naturally occurring amino acid
CCXEYXCCNPACTGCXXY

SEQ ID NO: 492 - protein, 16 aa, Artificial Sequence
  Synthetically generated peptide
  VARIANT (1)..(16): Xaa = Any Amino Acid
  VARIANT (3)..(8): Xaa = Any Amino Acid
CCXEYCCXNPACTGCY

SEQ ID NO: 493 - protein, 17 aa, Artificial Sequence
  Synthetically generated peptide
  VARIANT (3)..(8): Xaa = Any Amino Acid
  misc_feature (9)..(9): Xaa can be any naturally occurring amino acid
CCXEYCCXXNPACTGCY

SEQ ID NO: 494 - protein, 18 aa, Artificial Sequence
  Synthetically generated peptide
  VARIANT (3)..(8): Xaa = Any Amino Acid
  misc_feature (9)..(10): Xaa can be any naturally occurring amino acid
CCXEYCCXXXNPACTGCY

SEQ ID NO: 495 - protein, 18 aa, Artificial Sequence
  Synthetically generated peptide
  VARIANT (3)..(8): Xaa = Any Amino Acid
  misc_feature (9)..(9): Xaa can be any naturally occurring amino acid
  misc_feature (11)..(11): Xaa can be any naturally occurring amino acid
CCXEYCCXXNXPACTGCY

SEQ ID NO: 496 - protein, 18 aa, Artificial Sequence
  Synthetically generated peptide
  VARIANT (3)..(8): Xaa = Any Amino Acid
  misc_feature (9)..(9): Xaa can be any naturally occurring amino acid
  misc_feature (12)..(12): Xaa can be any naturally occurring amino acid
CCXEYCCXXNPXACTGCY

SEQ ID NO: 497 - protein, 18 aa, Artificial Sequence
  Synthetically generated peptide
  VARIANT (3)..(8): Xaa = Any Amino Acid
  misc_feature (9)..(9): Xaa can be any naturally occurring amino acid
  misc_feature (13)..(13): Xaa can be any naturally occurring amino acid
CCXEYCCXXNPAXCTGCY

SEQ ID NO: 498 - protein, 18 aa, Artificial Sequence
  Synthetically generated peptide
  VARIANT (3)..(8): Xaa = Any Amino Acid
  misc_feature (9)..(9): Xaa can be any naturally occurring amino acid
  misc_feature (14)..(14): Xaa can be any naturally occurring amino acid
CCXEYCCXXNPACXTGCY

SEQ ID NO: 499 - protein, 18 aa, Artificial Sequence
  Synthetically generated peptide
  VARIANT (3)..(8): Xaa = Any Amino Acid
  misc_feature (9)..(9): Xaa can be any naturally occurring amino acid
  misc_feature (15)..(15): Xaa can be any naturally occurring amino acid
CCXEYCCXXNPACTXGCY

SEQ ID NO: 500 - protein, 18 aa, Artificial Sequence
  Synthetically generated peptide
  VARIANT (3)..(8): Xaa = Any Amino Acid
  misc_feature (9)..(9): Xaa can be any naturally occurring amino acid
  misc_feature (16)..(16): Xaa can be any naturally occurring amino acid
CCXEYCCXXNPACTGXCY

SEQ ID NO: 501 - protein, 18 aa, Artificial Sequence
  Synthetically generated peptide
  VARIANT (3)..(8): Xaa = Any Amino Acid
  misc_feature (9)..(9): Xaa can be any naturally occurring amino acid
  misc_feature (17)..(17): Xaa can be any naturally occurring amino acid
CCXEYCCXXNPACTGCXY

SEQ ID NO: 502 - protein, 17 aa, Artificial Sequence
  Synthetically generated peptide
  VARIANT (3)..(8): Xaa = Any Amino Acid
  misc_feature (10)..(10): Xaa can be any naturally occurring amino acid
CCXEYCCXNXPACTGCY

SEQ ID NO: 503 - protein, 18 aa, Artificial Sequence
  Synthetically generated peptide
  VARIANT (3)..(8): Xaa = Any Amino Acid
  misc_feature (10)..(11): Xaa can be any naturally occurring amino acid
CCXEYCCXNXXPACTGCY

SEQ ID NO: 504 - protein, 18 aa, Artificial Sequence
  Synthetically generated peptide
  VARIANT (3)..(8): Xaa = Any Amino Acid
  misc_feature (10)..(10): Xaa can be any naturally occurring amino acid
  misc_feature (12)..(12): Xaa can be any naturally occurring amino acid
CCXEYCCXNXPXACTGCY

SEQ ID NO: 505 - protein, 18 aa, Artificial Sequence
  Synthetically generated peptide
  VARIANT (3)..(8): Xaa = Any Amino Acid
  misc_feature (10)..(10): Xaa can be any naturally occurring amino acid
  misc_feature (13)..(13): Xaa can be any naturally occurring amino acid
CCXEYCCXNXPAXCTGCY

SEQ ID NO: 506 - protein, 18 aa, Artificial Sequence
  Synthetically generated peptide
  VARIANT (3)..(8): Xaa = Any Amino Acid
  misc_feature (10)..(10): Xaa can be any naturally occurring amino acid
  misc_feature (14)..(14): Xaa can be any naturally occurring amino acid
CCXEYCCXNXPACXTGCY

SEQ ID NO: 507 - protein, 18 aa, Artificial Sequence
  Synthetically generated peptide
  VARIANT (3)..(8): Xaa = Any Amino Acid
  misc_feature (10)..(10): Xaa can be any naturally occurring amino acid
  misc_feature (15)..(15): Xaa can be any naturally occurring amino acid
CCXEYCCXNXPACTXGCY

SEQ ID NO: 508 - protein, 18 aa, Artificial Sequence
  Synthetically generated peptide
  VARIANT (3)..(8): Xaa = Any Amino Acid
  misc_feature (10)..(10): Xaa can be any naturally occurring amino acid
  misc_feature (16)..(16): Xaa can be any naturally occurring amino acid
CCXEYCCXNXPACTGXCY

SEQ ID NO: 509 - protein, 18 aa, Artificial Sequence
  Synthetically generated peptide
  VARIANT (3)..(8): Xaa = Any Amino Acid
  misc_feature (10)..(10): Xaa can be any naturally occurring amino acid
  misc_feature (17)..(17): Xaa can be any naturally occurring amino acid
CCXEYCCXNXPACTGCXY

SEQ ID NO: 510 - protein, 17 aa, Artificial Sequence
  Synthetically generated peptide
  VARIANT (3)..(8): Xaa = Any Amino Acid
  misc_feature (11)..(11): Xaa can be any naturally occurring amino acid
CCXEYCCXNPXACTGCY

SEQ ID NO: 511 - protein, 18 aa, Artificial Sequence
  Synthetically generated peptide
  VARIANT (3)..(8): Xaa = Any Amino Acid
  misc_feature (11)..(12): Xaa can be any naturally occurring amino acid
CCXEYCCXNPXXACTGCY

SEQ ID NO: 512 - protein, 18 aa, Artificial Sequence
  Synthetically generated peptide
  VARIANT (3)..(8): Xaa = Any Amino Acid
  misc_feature (11)..(11): Xaa can be any naturally occurring amino acid
  misc_feature (13)..(13): Xaa can be any naturally occurring amino acid
CCXEYCCXNPXAXCTGCY

SEQ ID NO: 513 - protein, 18 aa, Artificial Sequence
  Synthetically generated peptide
  VARIANT (3)..(8): Xaa = Any Amino Acid
  misc_feature (11)..(11): Xaa can be any naturally occurring amino acid
  misc_feature (14)..(14): Xaa can be any naturally occurring amino acid
CCXEYCCXNPXACXTGCY

SEQ ID NO: 514 - protein, 18 aa, Artificial Sequence
  Synthetically generated peptide
  VARIANT (3)..(8): Xaa = Any Amino Acid
  misc_feature (11)..(11): Xaa can be any naturally occurring amino acid
  misc_feature (15)..(15): Xaa can be any naturally occurring amino acid
CCXEYCCXNPXACTXGCY

SEQ ID NO: 515 - protein, 18 aa, Artificial Sequence
  Synthetically generated peptide
  VARIANT (3)..(8): Xaa = Any Amino Acid
  misc_feature (11)..(11): Xaa can be any naturally occurring amino acid
  misc_feature (16)..(16): Xaa can be any naturally occurring amino acid
CCXEYCCXNPXACTGXCY

SEQ ID NO: 516 - protein, 18 aa, Artificial Sequence
  Synthetically generated peptide
  VARIANT (3)..(8): Xaa = Any Amino Acid
  misc_feature (11)..(11): Xaa can be any naturally occurring amino acid
  misc_feature (17)..(17): Xaa can be any naturally occurring amino acid
CCXEYCCXNPXACTGCXY

SEQ ID NO: 517 - protein, 17 aa, Artificial Sequence
  Synthetically generated peptide
  VARIANT (3)..(8): Xaa = Any Amino Acid
  misc_feature (12)..(12): Xaa can be any naturally occurring amino acid
CCXEYCCXNPAXCTGCY

SEQ ID NO: 518 - protein, 18 aa, Artificial Sequence
  Synthetically generated peptide
  VARIANT (3)..(8): Xaa = Any Amino Acid
  misc_feature (12)..(13): Xaa can be any naturally occurring amino acid
CCXEYCCXNPAXXCTGCY

SEQ ID NO: 519 - protein, 18 aa, Artificial Sequence
  Synthetically generated peptide
  VARIANT (3)..(8): Xaa = Any Amino Acid
  misc_feature (12)..(12): Xaa can be any naturally occurring amino acid
  misc_feature (14)..(14): Xaa can be any naturally occurring amino acid
CCXEYCCXNPAXCXTGCY

SEQ ID NO: 520 - protein, 18 aa, Artificial Sequence
  Synthetically generated peptide
  VARIANT (3)..(8): Xaa = Any Amino Acid
  misc_feature (12)..(12): Xaa can be any naturally occurring amino acid
  misc_feature (15)..(15): Xaa can be any naturally occurring amino acid
CCXEYCCXNPAXCTXGCY

SEQ ID NO: 521 - protein, 18 aa, Artificial Sequence
  Synthetically generated peptide
  VARIANT (3)..(8): Xaa = Any Amino Acid
  misc_feature (12)..(12): Xaa can be any naturally occurring amino acid
  misc_feature (16)..(16): Xaa can be any naturally occurring amino acid
CCXEYCCXNPAXCTGXCY

SEQ ID NO: 522 - protein, 18 aa, Artificial Sequence
  Synthetically generated peptide
  VARIANT (3)..(8): Xaa = Any Amino Acid
  misc_feature (12)..(12): Xaa can be any naturally occurring amino acid
  misc_feature (17)..(17): Xaa can be any naturally occurring amino acid
CCXEYCCXNPAXCTGCXY

SEQ ID NO: 523 - protein, 17 aa, Artificial Sequence
  Synthetically generated peptide
  VARIANT (3)..(8): Xaa = Any Amino Acid
  misc_feature (13)..(13): Xaa can be any naturally occurring amino acid
CCXEYCCXNPACXTGCY

SEQ ID NO: 524 - protein, 18 aa, Artificial Sequence
  Synthetically generated peptide
  VARIANT (3)..(8): Xaa = Any Amino Acid
  misc_feature (13)..(14): Xaa can be any naturally occurring amino acid
CCXEYCCXNPACXXTGCY

SEQ ID NO: 525 - protein, 18 aa, Artificial Sequence
  Synthetically generated peptide
  VARIANT (3)..(8): Xaa = Any Amino Acid
  misc_feature (13)..(13): Xaa can be any naturally occurring amino acid
  misc_feature (15)..(15): Xaa can be any naturally occurring amino acid
CCXEYCCXNPACXTXGCY

SEQ ID NO: 526 - protein, 18 aa, Artificial Sequence
  Synthetically generated peptide
  VARIANT (3)..(8): Xaa = Any Amino Acid
  misc_feature (13)..(13): Xaa can be any naturally occurring amino acid
  misc_feature (16)..(16): Xaa can be any naturally occurring amino acid
CCXEYCCXNPACXTGXCY

SEQ ID NO: 527 - protein, 18 aa, Artificial Sequence
  Synthetically generated peptide
  VARIANT (3)..(8): Xaa = Any Amino Acid
  misc_feature (13)..(13): Xaa can be any naturally occurring amino acid
  misc_feature (17)..(17): Xaa can be any naturally occurring amino acid
CCXEYCCXNPACXTGCXY

SEQ ID NO: 528 - protein, 17 aa, Artificial Sequence
  Synthetically generated peptide
  VARIANT (3)..(8): Xaa = Any Amino Acid
  misc_feature (14)..(14): Xaa can be any naturally occurring amino acid
CCXEYCCXNPACTXGCY

SEQ ID NO: 529 - protein, 18 aa, Artificial Sequence
  Synthetically generated peptide
  VARIANT (3)..(8): Xaa = Any Amino Acid
  misc_feature (14)..(15): Xaa can be any naturally occurring amino acid
CCXEYCCXNPACTXXGCY

SEQ ID NO: 530 - protein, 18 aa, Artificial Sequence
  Synthetically generated peptide
  VARIANT (3)..(8): Xaa = Any Amino Acid
  misc_feature (14)..(14): Xaa can be any naturally occurring amino acid
  misc_feature (16)..(16): Xaa can be any naturally occurring amino acid
CCXEYCCXNPACTXGXCY

SEQ ID NO: 531 - protein, 18 aa, Artificial Sequence
  Synthetically generated peptide
  VARIANT (3)..(8): Xaa = Any Amino Acid
  misc_feature (14)..(14): Xaa can be any naturally occurring amino acid
  misc_feature (17)..(17): Xaa can be any naturally occurring amino acid
CCXEYCCXNPACTXGCXY

SEQ ID NO: 532 - protein, 17 aa, Artificial Sequence
  Synthetically generated peptide
  VARIANT (3)..(8): Xaa = Any Amino Acid
  misc_feature (15)..(15): Xaa can be any naturally occurring amino acid
CCXEYCCXNPACTGXCY

SEQ ID NO: 533 - protein, 18 aa, Artificial Sequence
  Synthetically generated peptide
  VARIANT (3)..(8): Xaa = Any Amino Acid
  misc_feature (15)..(16): Xaa can be any naturally occurring amino acid
CCXEYCCXNPACTGXXCY

SEQ ID NO: 534 - protein, 18 aa, Artificial Sequence
  Synthetically generated peptide
  VARIANT (3)..(8): Xaa = Any Amino Acid
  misc_feature (15)..(15): Xaa can be any naturally occurring amino acid
  misc_feature (17)..(17): Xaa can be any naturally occurring amino acid
CCXEYCCXNPACTGXCXY

SEQ ID NO: 535 - protein, 17 aa, Artificial Sequence
  Synthetically generated peptide
  VARIANT (3)..(8): Xaa = Any Amino Acid
  misc_feature (16)..(16): Xaa can be any naturally occurring amino acid
CCXEYCCXNPACTGCXY

SEQ ID NO: 536 - protein, 18 aa, Artificial Sequence
  Synthetically generated peptide
  VARIANT (3)..(8): Xaa = Any Amino Acid
  misc_feature (16)..(17): Xaa can be any naturally occurring amino acid
CCXEYCCXNPACTGCXXY

SEQ ID NO: 537 - protein, 16 aa, Artificial Sequence
  Synthetically generated peptide
  VARIANT (3)..(9): Xaa = Any Amino Acid
CCXEYCCNXPACTGCY

SEQ ID NO: 538 - protein, 17 aa, Artificial Sequence
  Synthetically generated peptide
  VARIANT (3)..(9): Xaa = Any Amino Acid
  misc_feature (10)..(10): Xaa can be any naturally occurring amino acid
CCXEYCCNXXPACTGCY

SEQ ID NO: 539 - protein, 18 aa, Artificial Sequence
  Synthetically generated peptide
  VARIANT (3)..(9): Xaa = Any Amino Acid
  misc_feature (10)..(11): Xaa can be any naturally occurring amino acid
CCXEYCCNXXXPACTGCY

SEQ ID NO: 540 - protein, 18 aa, Artificial Sequence
  Synthetically generated peptide
  VARIANT (3)..(9): Xaa = Any Amino Acid
  misc_feature (10)..(10): Xaa can be any naturally occurring amino acid
  misc_feature (12)..(12): Xaa can be any naturally occurring amino acid
CCXEYCCNXXPXACTGCY

SEQ ID NO: 541 - protein, 18 aa, Artificial Sequence
  Synthetically generated peptide
  VARIANT (3)..(9): Xaa = Any Amino Acid
  misc_feature (10)..(10): Xaa can be any naturally occurring amino acid
  misc_feature (13)..(13): Xaa can be any naturally occurring amino acid
CCXEYCCNXXPAXCTGCY

SEQ ID NO: 542 - protein, 18 aa, Artificial Sequence
  Synthetically generated peptide
  VARIANT (3)..(9): Xaa = Any Amino Acid
  misc_feature (10)..(10): Xaa can be any naturally occurring amino acid
  misc_feature (14)..(14): Xaa can be any naturally occurring amino acid
CCXEYCCNXXPACXTGCY

SEQ ID NO: 543 - protein, 18 aa, Artificial Sequence
  Synthetically generated peptide
  VARIANT (3)..(9): Xaa = Any Amino Acid
  misc_feature (10)..(10): Xaa can be any naturally occurring amino acid
  misc_feature (15)..(15): Xaa can be any naturally occurring amino acid
CCXEYCCNXXPACTXGCY

SEQ ID NO: 544 - protein, 18 aa, Artificial Sequence
  Synthetically generated peptide
  VARIANT (3)..(9): Xaa = Any Amino Acid
  misc_feature (10)..(10): Xaa can be any naturally occurring amino acid
  misc_feature (16)..(16): Xaa can be any naturally occurring amino acid
CCXEYCCNXXPACTGXCY

SEQ ID NO: 545 - protein, 18 aa, Artificial Sequence
  Synthetically generated peptide
  VARIANT (3)..(9): Xaa = Any Amino Acid
  misc_feature (10)..(10): Xaa can be any naturally occurring amino acid
  misc_feature (17)..(17): Xaa can be any naturally occurring amino acid
CCXEYCCNXXPACTGCXY

SEQ ID NO: 546 - protein, 17 aa, Artificial Sequence
  Synthetically generated peptide
  VARIANT (3)..(9): Xaa = Any Amino Acid
  misc_feature (11)..(11): Xaa can be any naturally occurring amino acid
CCXEYCCNXPXACTGCY

SEQ ID NO: 547 - protein, 18 aa, Artificial Sequence
  Synthetically generated peptide
  VARIANT (3)..(9): Xaa = Any Amino Acid
  misc_feature (11)..(12): Xaa can be any naturally occurring amino acid
CCXEYCCNXPXXACTGCY

SEQ ID NO: 548 - protein, 18 aa, Artificial Sequence
  Synthetically generated peptide
  VARIANT (3)..(9): Xaa = Any Amino Acid
  misc_feature (11)..(11): Xaa can be any naturally occurring amino acid
  misc_feature (13)..(13): Xaa can be any naturally occurring amino acid
CCXEYCCNXPXAXCTGCY

SEQ ID NO: 549 - protein, 18 aa, Artificial Sequence
  Synthetically generated peptide
  VARIANT (3)..(9): Xaa = Any Amino Acid
  misc_feature (11)..(11): Xaa can be any naturally occurring amino acid
  misc_feature (14)..(14): Xaa can be any naturally occurring amino acid
CCXEYCCNXPXACXTGCY

SEQ ID NO: 550 - protein, 18 aa, Artificial Sequence
  Synthetically generated peptide
  VARIANT (3)..(9): Xaa = Any Amino Acid
  misc_feature (11)..(11): Xaa can be any naturally occurring amino acid
  misc_feature (15)..(15): Xaa can be any naturally occurring amino acid
CCXEYCCNXPXACTXGCY

SEQ ID NO: 551 - protein, 18 aa, Artificial Sequence
  Synthetically generated peptide
  VARIANT (3)..(9): Xaa = Any Amino Acid
  misc_feature (11)..(11): Xaa can be any naturally occurring amino acid
  misc_feature (16)..(16): Xaa can be any naturally occurring amino acid
CCXEYCCNXPXACTGXCY

SEQ ID NO: 552 - protein, 18 aa, Artificial Sequence
  Synthetically generated peptide
  VARIANT (3)..(9): Xaa = Any Amino Acid
  misc_feature (11)..(11): Xaa can be any naturally occurring amino acid
  misc_feature (17)..(17): Xaa can be any naturally occurring amino acid
CCXEYCCNXPXACTGCXY

SEQ ID NO: 553 - protein, 17 aa, Artificial Sequence
  Synthetically generated peptide
  VARIANT (3)..(9): Xaa = Any Amino Acid
  misc_feature (12)..(12): Xaa can be any naturally occurring amino acid
CCXEYCCNXPAXCTGCY

SEQ ID NO: 554 - protein, 18 aa, Artificial Sequence
  Synthetically generated peptide
  VARIANT (3)..(9): Xaa = Any Amino Acid
  misc_feature (12)..(13): Xaa can be any naturally occurring amino acid
CCXEYCCNXPAXXCTGCY

SEQ ID NO: 555 - protein, 18 aa, Artificial Sequence
  Synthetically generated peptide
  VARIANT (3)..(9): Xaa = Any Amino Acid
  misc_feature (12)..(12): Xaa can be any naturally occurring amino acid
  misc_feature (14)..(14): Xaa can be any naturally occurring amino acid
CCXEYCCNXPAXCXTGCY

SEQ ID NO: 556 - protein, 18 aa, Artificial Sequence
  Synthetically generated peptide
  VARIANT (3)..(9): Xaa = Any Amino Acid
  misc_feature (12)..(12): Xaa can be any naturally occurring amino acid
  misc_feature (15)..(15): Xaa can be any naturally occurring amino acid
CCXEYCCNXPAXCTXGCY

SEQ ID NO: 557 - protein, 18 aa, Artificial Sequence
  Synthetically generated peptide
  VARIANT (3)..(9): Xaa = Any Amino Acid
  misc_feature (12)..(12): Xaa can be any naturally occurring amino acid
  misc_feature (16)..(16): Xaa can be any naturally occurring amino acid
CCXEYCCNXPAXCTGXCY

SEQ ID NO: 558 - protein, 18 aa, Artificial Sequence
  Synthetically generated peptide
  VARIANT (3)..(9): Xaa = Any Amino Acid
  misc_feature (12)..(12): Xaa can be any naturally occurring amino acid
  misc_feature (17)..(17): Xaa can be any naturally occurring amino acid
CCXEYCCNXPAXCTGCXY

SEQ ID NO: 559 - protein, 17 aa, Artificial Sequence
  Synthetically generated peptide
  VARIANT (3)..(9): Xaa = Any Amino Acid
  misc_feature (13)..(13): Xaa can be any naturally occurring amino acid
CCXEYCCNXPACXTGCY

SEQ ID NO: 560 - protein, 18 aa, Artificial Sequence
  Synthetically generated peptide
  VARIANT (3)..(9): Xaa = Any Amino Acid
  misc_feature (13)..(14): Xaa can be any naturally occurring amino acid
CCXEYCCNXPACXXTGCY

SEQ ID NO: 561 - protein, 18 aa, Artificial Sequence
  Synthetically generated peptide
  VARIANT (1)..(15): Xaa = Any Amino Acid
CCXEYCCNXPACXTXGCY

SEQ ID NO: 562 - protein, 18 aa, Artificial Sequence
  Synthetically generated peptide
  VARIANT (3)..(9): Xaa = Any Amino Acid
  misc_feature (13)..(13): Xaa can be any naturally occurring amino acid
  misc_feature (16)..(16): Xaa can be any naturally occurring amino acid
CCXEYCCNXPACXTGXCY

SEQ ID NO: 563 - protein, 18 aa, Artificial Sequence
  Synthetically generated peptide
  VARIANT (3)..(9): Xaa = Any Amino Acid
  misc_feature (13)..(13): Xaa can be any naturally occurring amino acid
  misc_feature (17)..(17): Xaa can be any naturally occurring amino acid
CCXEYCCNXPACXTGCXY

SEQ ID NO: 564 - protein, 17 aa, Artificial Sequence
  Synthetically generated peptide
  VARIANT (3)..(9): Xaa = Any Amino Acid
  misc_feature (14)..(14): Xaa can be any naturally occurring amino acid
CCXEYCCNXPACTXGCY

SEQ ID NO: 565 - protein, 18 aa, Artificial Sequence
  Synthetically generated peptide
  VARIANT (3)..(9): Xaa = Any Amino Acid
  misc_feature (14)..(15): Xaa can be any naturally occurring amino acid
CCXEYCCNXPACTXXGCY

SEQ ID NO: 566 - protein, 18 aa, Artificial Sequence
  Synthetically generated peptide
  VARIANT (3)..(9): Xaa = Any Amino Acid
  misc_feature (14)..(14): Xaa can be any naturally occurring amino acid
  misc_feature (16)..(16): Xaa can be any naturally occurring amino acid
CCXEYCCNXPACTXGXCY

SEQ ID NO: 567 - protein, 18 aa, Artificial Sequence
  Synthetically generated peptide
  VARIANT (3)..(9): Xaa = Any Amino Acid
  misc_feature (14)..(14): Xaa can be any naturally occurring amino acid
  misc_feature (17)..(17): Xaa can be any naturally occurring amino acid
CCXEYCCNXPACTXGCXY

SEQ ID NO: 568 - protein, 17 aa, Artificial Sequence
  Synthetically generated peptide
  VARIANT (3)..(9): Xaa = Any Amino Acid
  misc_feature (15)..(15): Xaa can be any naturally occurring amino acid
CCXEYCCNXPACTGXCY

SEQ ID NO: 569 - protein, 18 aa, Artificial Sequence
  Synthetically generated peptide
  VARIANT (3)..(9): Xaa = Any Amino Acid
  misc_feature (15)..(16): Xaa can be any naturally occurring amino acid
CCXEYCCNXPACTGXXCY

SEQ ID NO: 570 - protein, 18 aa, Artificial Sequence
  Synthetically generated peptide
  VARIANT (3)..(9): Xaa = Any Amino Acid
  misc_feature (15)..(15): Xaa can be any naturally occurring amino acid
  misc_feature (17)..(17): Xaa can be any naturally occurring amino acid
CCXEYCCNXPACTGXCXY

SEQ ID NO: 571 - protein, 17 aa, Artificial Sequence
  Synthetically generated peptide
  VARIANT (3)..(9): Xaa = Any Amino Acid
  misc_feature (16)..(16): Xaa can be any naturally occurring amino acid
CCXEYCCNXPACTGCXY

SEQ ID NO: 572 - protein, 18 aa, Artificial Sequence
  Synthetically generated peptide
  VARIANT (3)..(9): Xaa = Any Amino Acid
  misc_feature (16)..(17): Xaa can be any naturally occurring amino acid
CCXEYCCNXPACTGCXXY

SEQ ID NO: 573 - protein, 16 aa, Artificial Sequence
  Synthetically generated peptide
  VARIANT (1)..(16): Xaa = Any Amino Acid
  VARIANT (3)..(10): Xaa = Any Amino Acid
CCXEYCCNPXACTGCY

SEQ ID NO: 574 - protein, 17 aa, Artificial Sequence
  Synthetically generated peptide
  VARIANT (3)..(10): Xaa = Any Amino Acid
  misc_feature (11)..(11): Xaa can be any naturally occurring amino acid
CCXEYCCNPXXACTGCY

SEQ ID NO: 575 - protein, 18 aa, Artificial Sequence
  Synthetically generated peptide
  VARIANT (3)..(10): Xaa = Any Amino Acid
  misc_feature (11)..(12): Xaa can be any naturally occurring amino acid
CCXEYCCNPXXXACTGCY

SEQ ID NO: 576 - protein, 18 aa, Artificial Sequence
  Synthetically generated peptide
  VARIANT (3)..(10): Xaa = Any Amino Acid
  misc_feature (11)..(11): Xaa can be any naturally occurring amino acid
  misc_feature (13)..(13): Xaa can be any naturally occurring amino acid
CCXEYCCNPXXAXCTGCY

SEQ ID NO: 577 - protein, 18 aa, Artificial Sequence
  Synthetically generated peptide
  VARIANT (3)..(10): Xaa = Any Amino Acid
  misc_feature (11)..(11): Xaa can be any naturally occurring amino acid
  misc_feature (14)..(14): Xaa can be any naturally occurring amino acid
CCXEYCCNPXXACXTGCY

SEQ ID NO: 578 - protein, 18 aa, Artificial Sequence
  Synthetically generated peptide
  VARIANT (3)..(10): Xaa = Any Amino Acid
  misc_feature (11)..(11): Xaa can be any naturally occurring amino acid
  misc_feature (15)..(15): Xaa can be any naturally occurring amino acid
CCXEYCCNPXXACTXGCY

SEQ ID NO: 579 - protein, 18 aa, Artificial Sequence
  Synthetically generated peptide
  VARIANT (3)..(10): Xaa = Any Amino Acid
  misc_feature (11)..(11): Xaa can be any naturally occurring amino acid
  misc_feature (16)..(16): Xaa can be any naturally occurring amino acid
CCXEYCCNPXXACTGXCY

SEQ ID NO: 580 - protein, 18 aa, Artificial Sequence
  Synthetically generated peptide
  VARIANT (3)..(10): Xaa = Any Amino Acid
  misc_feature (11)..(11): Xaa can be any naturally occurring amino acid
  misc_feature (17)..(17): Xaa can be any naturally occurring amino acid
CCXEYCCNPXXACTGCXY

SEQ ID NO: 581 - protein, 17 aa, Artificial Sequence
  Synthetically generated peptide
  VARIANT (3)..(10): Xaa = Any Amino Acid
  misc_feature (12)..(12): Xaa can be any naturally occurring amino acid
CCXEYCCNPXAXCTGCY

SEQ ID NO: 582 - protein, 18 aa, Artificial Sequence
  Synthetically generated peptide
  VARIANT (3)..(10): Xaa = Any Amino Acid
  misc_feature (12)..(13): Xaa can be any naturally occurring amino acid
CCXEYCCNPXAXXCTGCY

SEQ ID NO: 583 - protein, 18 aa, Artificial Sequence
  Synthetically generated peptide
  VARIANT (3)..(10): Xaa = Any Amino Acid
  misc_feature (12)..(12): Xaa can be any naturally occurring amino acid
  misc_feature (14)..(14): Xaa can be any naturally occurring amino acid
CCXEYCCNPXAXCXTGCY

SEQ ID NO: 584 - protein, 18 aa, Artificial Sequence
  Synthetically generated peptide
  VARIANT (3)..(10): Xaa = Any Amino Acid
  misc_feature (12)..(12): Xaa can be any naturally occurring amino acid
  misc_feature (15)..(15): Xaa can be any naturally occurring amino acid
CCXEYCCNPXAXCTXGCY

SEQ ID NO: 585 - protein, 18 aa, Artificial Sequence
  Synthetically generated peptide
  VARIANT (3)..(10): Xaa = Any Amino Acid
  misc_feature (12)..(12): Xaa can be any naturally occurring amino acid
  misc_feature (16)..(16): Xaa can be any naturally occurring amino acid
CCXEYCCNPXAXCTGXCY

SEQ ID NO: 586 - protein, 18 aa, Artificial Sequence
  Synthetically generated peptide
  VARIANT (3)..(10): Xaa = Any Amino Acid
  misc_feature (12)..(12): Xaa can be any naturally occurring amino acid
  misc_feature (17)..(17): Xaa can be any naturally occurring amino acid
CCXEYCCNPXAXCTGCXY

SEQ ID NO: 587 - protein, 17 aa, Artificial Sequence
  Synthetically generated peptide
  VARIANT (3)..(10): Xaa = Any Amino Acid
  misc_feature (13)..(13): Xaa can be any naturally occurring amino acid
CCXEYCCNPXACXTGCY

SEQ ID NO: 588 - protein, 18 aa, Artificial Sequence
  Synthetically generated peptide
  VARIANT (3)..(10): Xaa = Any Amino Acid
  misc_feature (13)..(14): Xaa can be any naturally occurring amino acid
CCXEYCCNPXACXXTGCY

SEQ ID NO: 589 - protein, 18 aa, Artificial Sequence
  Synthetically generated peptide
  VARIANT (3)..(10): Xaa = Any Amino Acid
  misc_feature (13)..(13): Xaa can be any naturally occurring amino acid
  misc_feature (15)..(15): Xaa can be any naturally occurring amino acid
CCXEYCCNPXACXTXGCY

SEQ ID NO: 590 - protein, 18 aa, Artificial Sequence
  Synthetically generated peptide
  VARIANT (3)..(10): Xaa = Any Amino Acid
  misc_feature (13)..(13): Xaa can be any naturally occurring amino acid
  misc_feature (16)..(16): Xaa can be any naturally occurring amino acid
CCXEYCCNPXACXTGXCY

SEQ ID NO: 591 - protein, 18 aa, Artificial Sequence
  Synthetically generated peptide
  VARIANT (3)..(10): Xaa = Any Amino Acid
  misc_feature (13)..(13): Xaa can be any naturally occurring amino acid
  misc_feature (17)..(17): Xaa can be any naturally occurring amino acid
CCXEYCCNPXACXTGCXY

SEQ ID NO: 592 - protein, 17 aa, Artificial Sequence
  Synthetically generated peptide
  VARIANT (3)..(10): Xaa = Any Amino Acid
  misc_feature (14)..(14): Xaa can be any naturally occurring amino acid
CCXEYCCNPXACTXGCY

SEQ ID NO: 593 - protein, 18 aa, Artificial Sequence
  Synthetically generated peptide
  VARIANT (3)..(10): Xaa = Any Amino Acid
  misc_feature (14)..(15): Xaa can be any naturally occurring amino acid
CCXEYCCNPXACTXXGCY

SEQ ID NO: 594 - protein, 18 aa, Artificial Sequence
  Synthetically generated peptide
  VARIANT (3)..(10): Xaa = Any Amino Acid
  misc_feature (14)..(14): Xaa can be any naturally occurring amino acid
  misc_feature (16)..(16): Xaa can be any naturally occurring amino acid
CCXEYCCNPXACTXGXCY

SEQ ID NO: 595 - protein, 18 aa, Artificial Sequence
  Synthetically generated peptide
  VARIANT (3)..(10): Xaa = Any Amino Acid
  misc_feature (14)..(14): Xaa can be any naturally occurring amino acid
  misc_feature (17)..(17): Xaa can be any naturally occurring amino acid
CCXEYCCNPXACTXGCXY

SEQ ID NO: 596 - protein, 17 aa, Artificial Sequence
  Synthetically generated peptide
  VARIANT (3)..(10): Xaa = Any Amino Acid
  misc_feature (15)..(15): Xaa can be any naturally occurring amino acid
CCXEYCCNPXACTGXCY

SEQ ID NO: 597 - protein, 18 aa, Artificial Sequence
  Synthetically generated peptide
  VARIANT (3)..(10): Xaa = Any Amino Acid
  misc_feature (15)..(16): Xaa can be any naturally occurring amino acid
CCXEYCCNPXACTGXXCY

SEQ ID NO: 598 - protein, 18 aa, Artificial Sequence
  Synthetically generated peptide
  VARIANT (3)..(10): Xaa = Any Amino Acid
  misc_feature (15)..(15): Xaa can be any naturally occurring amino acid
  misc_feature (17)..(17): Xaa can be any naturally occurring amino acid
CCXEYCCNPXACTGXCXY

SEQ ID NO: 599 - protein, 17 aa, Artificial Sequence
  Synthetically generated peptide
  VARIANT (3)..(10): Xaa = Any Amino Acid
  misc_feature (16)..(16): Xaa can be any naturally occurring amino acid
CCXEYCCNPXACTGCXY

SEQ ID NO: 600 - protein, 18 aa, Artificial Sequence
  Synthetically generated peptide
  VARIANT (3)..(10): Xaa = Any Amino Acid
  misc_feature (16)..(17): Xaa can be any naturally occurring amino acid
CCXEYCCNPXACTGCXXY

SEQ ID NO: 601 - protein, 16 aa, Artificial Sequence
  Synthetically generated peptide
  VARIANT (1)..(16): Xaa = Any Amino Acid
  VARIANT (3)..(11): Xaa = Any Amino Acid
CCXEYCCNPAXCTGCY

SEQ ID NO: 602 - protein, 17 aa, Artificial Sequence
  Synthetically generated peptide
  VARIANT (3)..(11): Xaa = Any Amino Acid
  misc_feature (12)..(12): Xaa can be any naturally occurring amino acid
CCXEYCCNPAXXCTGCY

SEQ ID NO: 603 - protein, 18 aa, Artificial Sequence
  Synthetically generated peptide
  VARIANT (3)..(11): Xaa = Any Amino Acid
  misc_feature (12)..(13): Xaa can be any naturally occurring amino acid
CCXEYCCNPAXXXCTGCY

SEQ ID NO: 604 - protein, 18 aa, Artificial Sequence
  Synthetically generated peptide
  VARIANT (3)..(11): Xaa = Any Amino Acid
  misc_feature (12)..(12): Xaa can be any naturally occurring amino acid
  misc_feature (14)..(14): Xaa can be any naturally occurring amino acid
CCXEYCCNPAXXCXTGCY

SEQ ID NO: 605 - protein, 18 aa, Artificial Sequence
  Synthetically generated peptide
  VARIANT (3)..(11): Xaa = Any Amino Acid
  misc_feature (12)..(12): Xaa can be any naturally occurring amino acid
  misc_feature (15)..(15): Xaa can be any naturally occurring amino acid
CCXEYCCNPAXXCTXGCY

SEQ ID NO: 606 - protein, 18 aa, Artificial Sequence
  Synthetically generated peptide
  VARIANT (3)..(11): Xaa = Any Amino Acid
  misc_feature (12)..(12): Xaa can be any naturally occurring amino acid
  misc_feature (16)..(16): Xaa can be any naturally occurring amino acid
CCXEYCCNPAXXCTGXCY

SEQ ID NO: 607 - protein, 18 aa, Artificial Sequence
  Synthetically generated peptide
  VARIANT (3)..(11): Xaa = Any Amino Acid
  misc_feature (12)..(12): Xaa can be any naturally occurring amino acid
  misc_feature (17)..(17): Xaa can be any naturally occurring amino acid
CCXEYCCNPAXXCTGCXY

SEQ ID NO: 608 - protein, 17 aa, Artificial Sequence
  Synthetically generated peptide
  VARIANT (3)..(11): Xaa = Any Amino Acid
  misc_feature (13)..(13): Xaa can be any naturally occurring amino acid
CCXEYCCNPAXCXTGCY

SEQ ID NO: 609 - protein, 18 aa, Artificial Sequence
  Synthetically generated peptide
  VARIANT (3)..(11): Xaa = Any Amino Acid
  misc_feature (13)..(14): Xaa can be any naturally occurring amino acid
CCXEYCCNPAXCXXTGCY

SEQ ID NO: 610 - protein, 18 aa, Artificial Sequence
  Synthetically generated peptide
  VARIANT (3)..(11): Xaa = Any Amino Acid
  misc_feature (13)..(13): Xaa can be any naturally occurring amino acid
  misc_feature (15)..(15): Xaa can be any naturally occurring amino acid
CCXEYCCNPAXCXTXGCY

SEQ ID NO: 611 - protein, 18 aa, Artificial Sequence
  Synthetically generated peptide
  VARIANT (3)..(11): Xaa = Any Amino Acid
  misc_feature (13)..(13): Xaa can be any naturally occurring amino acid
  misc_feature (16)..(16): Xaa can be any naturally occurring amino acid
CCXEYCCNPAXCXTGXCY

SEQ ID NO: 612 - protein, 18 aa, Artificial Sequence
  Synthetically generated peptide
  VARIANT (3)..(11): Xaa = Any Amino Acid
  misc_feature (13)..(13): Xaa can be any naturally occurring amino acid
  misc_feature (17)..(17): Xaa can be any naturally occurring amino acid
CCXEYCCNPAXCXTGCXY

SEQ ID NO: 613 - protein, 17 aa, Artificial Sequence
  Synthetically generated peptide
  VARIANT (3)..(11): Xaa = Any Amino Acid
  misc_feature (14)..(14): Xaa can be any naturally occurring amino acid
CCXEYCCNPAXCTXGCY

SEQ ID NO: 614 - protein, 18 aa, Artificial Sequence
  Synthetically generated peptide
  VARIANT (3)..(11): Xaa = Any Amino Acid
  misc_feature (14)..(15): Xaa can be any naturally occurring amino acid
CCXEYCCNPAXCTXXGCY

SEQ ID NO: 615 - protein, 18 aa, Artificial Sequence
  Synthetically generated peptide
  VARIANT (3)..(11): Xaa = Any Amino Acid
  misc_feature (14)..(14): Xaa can be any naturally occurring amino acid
  misc_feature (16)..(16): Xaa can be any naturally occurring amino acid
CCXEYCCNPAXCTXGXCY

SEQ ID NO: 616 - protein, 18 aa, Artificial Sequence
  Synthetically generated peptide
  VARIANT (3)..(11): Xaa = Any Amino Acid
  misc_feature (14)..(14): Xaa can be any naturally occurring amino acid
  misc_feature (17)..(17): Xaa can be any naturally occurring amino acid
CCXEYCCNPAXCTXGCXY

SEQ ID NO: 617 - protein, 17 aa, Artificial Sequence
  Synthetically generated peptide
  VARIANT (3)..(11): Xaa = Any Amino Acid
  misc_feature (15)..(15): Xaa can be any naturally occurring amino acid
CCXEYCCNPAXCTGXCY

SEQ ID NO: 618 - protein, 18 aa, Artificial Sequence
  Synthetically generated peptide
  VARIANT (3)..(11): Xaa = Any Amino Acid
  misc_feature (15)..(16): Xaa can be any naturally occurring amino acid
CCXEYCCNPAXCTGXXCY

SEQ ID NO: 619 - protein, 18 aa, Artificial Sequence
  Synthetically generated peptide
  VARIANT (3)..(11): Xaa = Any Amino Acid
  misc_feature (15)..(15): Xaa can be any naturally occurring amino acid
  misc_feature (17)..(17): Xaa can be any naturally occurring amino acid
CCXEYCCNPAXCTGXCXY

SEQ ID NO: 620 - protein, 17 aa, Artificial Sequence
  Synthetically generated peptide
  VARIANT (3)..(11): Xaa = Any Amino Acid
  misc_feature (16)..(16): Xaa can be any naturally occurring amino acid
CCXEYCCNPAXCTGCXY

SEQ ID NO: 621 - protein, 18 aa, Artificial Sequence
  Synthetically generated peptide
  VARIANT (3)..(11): Xaa = Any Amino Acid
  misc_feature (16)..(17): Xaa can be any naturally occurring amino acid
CCXEYCCNPAXCTGCXXY

SEQ ID NO: 622 - protein, 16 aa, Artificial Sequence
  Synthetically generated peptide
  VARIANT (3)..(12): Xaa = Any Amino Acid
CCXEYCCNPACXTGCY

SEQ ID NO: 623 - protein, 17 aa, Artificial Sequence
  Synthetically generated peptide
  VARIANT (3)..(12): Xaa = Any Amino Acid
  misc_feature (13)..(13): Xaa can be any naturally occurring amino acid
CCXEYCCNPACXXTGCY

SEQ ID NO: 624 - protein, 18 aa, Artificial Sequence
  Synthetically generated peptide
  VARIANT (3)..(12): Xaa = Any Amino Acid
  misc_feature (13)..(14): Xaa can be any naturally occurring amino acid
CCXEYCCNPACXXXTGCY

SEQ ID NO: 625 - protein, 18 aa, Artificial Sequence
  Synthetically generated peptide
  VARIANT (3)..(12): Xaa = Any Amino Acid
  misc_feature (13)..(13): Xaa can be any naturally occurring amino acid
  misc_feature (15)..(15): Xaa can be any naturally occurring amino acid
CCXEYCCNPACXXTXGCY

SEQ ID NO: 626 - protein, 18 aa, Artificial Sequence
  Synthetically generated peptide
  VARIANT (3)..(12): Xaa = Any Amino Acid
  misc_feature (13)..(13): Xaa can be any naturally occurring amino acid
  misc_feature (16)..(16): Xaa can be any naturally occurring amino acid
CCXEYCCNPACXXTGXCY

SEQ ID NO: 627 - protein, 18 aa, Artificial Sequence
  Synthetically generated peptide
  VARIANT (3)..(12): Xaa = Any Amino Acid
  misc_feature (13)..(13): Xaa can be any naturally occurring amino acid
  misc_feature (17)..(17): Xaa can be any naturally occurring amino acid
CCXEYCCNPACXXTGCXY

SEQ ID NO: 628 - protein, 17 aa, Artificial Sequence
  Synthetically generated peptide
  VARIANT (3)..(12): Xaa = Any Amino Acid
  misc_feature (14)..(14): Xaa can be any naturally occurring amino acid
CCXEYCCNPACXTXGCY

SEQ ID NO: 629 - protein, 18 aa, Artificial Sequence
  Synthetically generated peptide
  VARIANT (3)..(12): Xaa = Any Amino Acid
  misc_feature (14)..(15): Xaa can be any naturally occurring amino acid
CCXEYCCNPACXTXXGCY

SEQ ID NO: 630 - protein, 18 aa, Artificial Sequence
  Synthetically generated peptide
  VARIANT (3)..(12): Xaa = Any Amino Acid
  misc_feature (14)..(14): Xaa can be any naturally occurring amino acid
  misc_feature (16)..(16): Xaa can be any naturally occurring amino acid
CCXEYCCNPACXTXGXCY

SEQ ID NO: 631 - protein, 18 aa, Artificial Sequence
  Synthetically generated peptide
  VARIANT (3)..(12): Xaa = Any Amino Acid
  misc_feature (14)..(14): Xaa can be any naturally occurring amino acid
  misc_feature (17)..(17): Xaa can be any naturally occurring amino acid
CCXEYCCNPACXTXGCXY

SEQ ID NO: 632 - protein, 17 aa, Artificial Sequence
  Synthetically generated peptide
  VARIANT (3)..(12): Xaa = Any Amino Acid
  misc_feature (15)..(15): Xaa can be any naturally occurring amino acid
CCXEYCCNPACXTGXCY

SEQ ID NO: 633 - protein, 18 aa, Artificial Sequence
  Synthetically generated peptide
  VARIANT (3)..(12): Xaa = Any Amino Acid
  misc_feature (15)..(16): Xaa can be any naturally occurring amino acid
CCXEYCCNPACXTGXXCY

SEQ ID NO: 634 - protein, 18 aa, Artificial Sequence
  Synthetically generated peptide
  VARIANT (3)..(12): Xaa = Any Amino Acid
  misc_feature (15)..(15): Xaa can be any naturally occurring amino acid
  misc_feature (17)..(17): Xaa can be any naturally occurring amino acid
CCXEYCCNPACXTGXCXY

SEQ ID NO: 635 - protein, 17 aa, Artificial Sequence
  Synthetically generated peptide
  VARIANT (3)..(12): Xaa = Any Amino Acid
  misc_feature (16)..(16): Xaa can be any naturally occurring amino acid
CCXEYCCNPACXTGCXY

SEQ ID NO: 636 - protein, 18 aa, Artificial Sequence
  Synthetically generated peptide
  VARIANT (3)..(12): Xaa = Any Amino Acid
  misc_feature (16)..(17): Xaa can be any naturally occurring amino acid
CCXEYCCNPACXTGCXXY

SEQ ID NO: 637 - protein, 16 aa, Artificial Sequence
  Synthetically generated peptide
  VARIANT (3)..(13): Xaa = Any Amino Acid
CCXEYCCNPACTXGCY

SEQ ID NO: 638 - protein, 17 aa, Artificial Sequence
  Synthetically generated peptide
  VARIANT (3)..(13): Xaa = Any Amino Acid
  misc_feature (14)..(14): Xaa can be any naturally occurring amino acid
CCXEYCCNPACTXXGCY

SEQ ID NO: 639 - protein, 18 aa, Artificial Sequence
  Synthetically generated peptide
  VARIANT (3)..(13): Xaa = Any Amino Acid
  misc_feature (14)..(15): Xaa can be any naturally occurring amino acid
CCXEYCCNPACTXXXGCY

SEQ ID NO: 640 - protein, 18 aa, Artificial Sequence
  Synthetically generated peptide
  VARIANT (3)..(13): Xaa = Any Amino Acid
  misc_feature (14)..(14): Xaa can be any naturally occurring amino acid
  misc_feature (16)..(16): Xaa can be any naturally occurring amino acid
CCXEYCCNPACTXXGXCY

SEQ ID NO: 641 - protein, 18 aa, Artificial Sequence
  Synthetically generated peptide
  VARIANT (3)..(13): Xaa = Any Amino Acid
  misc_feature (14)..(14): Xaa can be any naturally occurring amino acid
  misc_feature (17)..(17): Xaa can be any naturally occurring amino acid
CCXEYCCNPACTXXGCXY

SEQ ID NO: 642 - protein, 17 aa, Artificial Sequence
  Synthetically generated peptide
  VARIANT (3)..(13): Xaa = Any Amino Acid
  misc_feature (15)..(15): Xaa can be any naturally occurring amino acid
CCXEYCCNPACTXGXCY

SEQ ID NO: 643 - protein, 18 aa, Artificial Sequence
  Synthetically generated peptide
  VARIANT (3)..(13): Xaa = Any Amino Acid
  misc_feature (15)..(16): Xaa can be any naturally occurring amino acid
CCXEYCCNPACTXGXXCY

SEQ ID NO: 644 - protein, 18 aa, Artificial Sequence
  Synthetically generated peptide
  VARIANT (3)..(13): Xaa = Any Amino Acid
  misc_feature (15)..(15): Xaa can be any naturally occurring amino acid
  misc_feature (17)..(17): Xaa can be any naturally occurring amino acid
CCXEYCCNPACTXGXCXY

SEQ ID NO: 645 - protein, 17 aa, Artificial Sequence
  Synthetically generated peptide
  VARIANT (3)..(13): Xaa = Any Amino Acid
  misc_feature (16)..(16): Xaa can be any naturally occurring amino acid
CCXEYCCNPACTXGCXY

SEQ ID NO: 646 - protein, 18 aa, Artificial Sequence
  Synthetically generated peptide
  VARIANT (3)..(13): Xaa = Any Amino Acid
  misc_feature (16)..(17): Xaa can be any naturally occurring amino acid
CCXEYCCNPACTXGCXXY

SEQ ID NO: 647 - protein, 16 aa, Artificial Sequence
  Synthetically generated peptide
  VARIANT (3)..(14): Xaa = Any Amino Acid
  VARIANT (3)..(14): Xaa = Any Amino Acid
CCXEYCCNPACTGXCY

SEQ ID NO: 648 - protein, 17 aa, Artificial Sequence
  Synthetically generated peptide
  VARIANT (3)..(14): Xaa = Any Amino Acid
  misc_feature (15)..(15): Xaa can be any naturally occurring amino acid
CCXEYCCNPACTGXXCY

SEQ ID NO: 649 - protein, 18 aa, Artificial Sequence
  Synthetically generated peptide
  VARIANT (3)..(14): Xaa = Any Amino Acid
  misc_feature (15)..(16): Xaa can be any naturally occurring amino acid
CCXEYCCNPACTGXXXCY

SEQ ID NO: 650 - protein, 18 aa, Artificial Sequence
  Synthetically generated peptide
  VARIANT (3)..(14): Xaa = Any Amino Acid
  misc_feature (15)..(15): Xaa can be any naturally occurring amino acid
  misc_feature (17)..(17): Xaa can be any naturally occurring amino acid
CCXEYCCNPACTGXXCXY

SEQ ID NO: 651 - protein, 17 aa, Artificial Sequence
  Synthetically generated peptide
  VARIANT (3)..(14): Xaa = Any Amino Acid
  misc_feature (16)..(16): Xaa can be any naturally occurring amino acid
CCXEYCCNPACTGXCXY

SEQ ID NO: 652 - protein, 18 aa, Artificial Sequence
  Synthetically generated peptide
  VARIANT (3)..(14): Xaa = Any Amino Acid
  misc_feature (16)..(17): Xaa can be any naturally occurring amino acid
CCXEYCCNPACTGXCXXY

SEQ ID NO: 653 - protein, 16 aa, Artificial Sequence
  Synthetically generated peptide
  VARIANT (1)..(16): Xaa = Any Amino Acid
  VARIANT (3)..(15): Xaa = Any Amino Acid
CCXEYCCNPACTGCXY

SEQ ID NO: 654 - protein, 17 aa, Artificial Sequence
  Synthetically generated peptide
  VARIANT (3)..(15): Xaa = Any Amino Acid
  misc_feature (16)..(16): Xaa can be any naturally occurring amino acid
CCXEYCCNPACTGCXXY

SEQ ID NO: 655 - protein, 18 aa, Artificial Sequence
  Synthetically generated peptide
  VARIANT (3)..(15): Xaa = Any Amino Acid
  misc_feature (16)..(17): Xaa can be any naturally occurring amino acid
CCXEYCCNPACTGCXXXY

SEQ ID NO: 656 - protein, 15 aa, Artificial Sequence
  Synthetically generated peptide
  VARIANT (4)..(4): Xaa = Any Amino Acid
CCEXYCCNPACTGCY

SEQ ID NO: 657 - protein, 16 aa, Artificial Sequence
  Synthetically generated peptide
  VARIANT (4)..(5): Xaa = Any Amino Acid
CCEXXYCCNPACTGCY

SEQ ID NO: 658 - protein, 17 aa, Artificial Sequence
  Synthetically generated peptide
  VARIANT (4)..(5): Xaa = Any Amino Acid
  misc_feature (6)..(6): Xaa can be any naturally occurring amino acid
CCEXXXYCCNPACTGCY

SEQ ID NO: 659 - protein, 18 aa, Artificial Sequence
  Synthetically generated peptide
  VARIANT (4)..(5): Xaa = Any Amino Acid
  misc_feature (6)..(7): Xaa can be any naturally occurring amino acid
CCEXXXXYCCNPACTGCY

SEQ ID NO: 660 - protein, 18 aa, Artificial Sequence
  Synthetically generated peptide
  VARIANT (4)..(5): Xaa = Any Amino Acid
  misc_feature (6)..(6): Xaa can be any naturally occurring amino acid
  misc_feature (8)..(8): Xaa can be any naturally occurring amino acid
CCEXXXYXCCNPACTGCY

SEQ ID NO: 661 - protein, 18 aa, Artificial Sequence
  Synthetically generated peptide
  VARIANT (4)..(5): Xaa = Any Amino Acid
  misc_feature (6)..(6): Xaa can be any naturally occurring amino acid
  misc_feature (10)..(10): Xaa can be any naturally occurring amino acid
CCEXXXYCCXNPACTGCY

SEQ ID NO: 662 - protein, 18 aa, Artificial Sequence
  Synthetically generated peptide
  VARIANT (4)..(5): Xaa = Any Amino Acid
  misc_feature (6)..(6): Xaa can be any naturally occurring amino acid
  misc_feature (11)..(11): Xaa can be any naturally occurring amino acid
CCEXXXYCCNXPACTGCY

SEQ ID NO: 663 - protein, 18 aa, Artificial Sequence
  Synthetically generated peptide
  VARIANT (4)..(5): Xaa = Any Amino Acid
  misc_feature (6)..(6): Xaa can be any naturally occurring amino acid
  misc_feature (12)..(12): Xaa can be any naturally occurring amino acid
CCEXXXYCCNPXACTGCY

SEQ ID NO: 664 - protein, 18 aa, Artificial Sequence
  Synthetically generated peptide
  VARIANT (4)..(5): Xaa = Any Amino Acid
  misc_feature (6)..(6): Xaa can be any naturally occurring amino acid
  misc_feature (13)..(13): Xaa can be any naturally occurring amino acid
CCEXXXYCCNPAXCTGCY

SEQ ID NO: 665 - protein, 18 aa, Artificial Sequence
  Synthetically generated peptide
  VARIANT (4)..(5): Xaa = Any Amino Acid
  misc_feature (6)..(6): Xaa can be any naturally occurring amino acid
  misc_feature (14)..(14): Xaa can be any naturally occurring amino acid
CCEXXXYCCNPACXTGCY

SEQ ID NO: 666 - protein, 18 aa, Artificial Sequence
  Synthetically generated peptide
  VARIANT (4)..(5): Xaa = Any Amino Acid
  misc_feature (6)..(6): Xaa can be any naturally occurring amino acid
  misc_feature (15)..(15): Xaa can be any naturally occurring amino acid
CCEXXXYCCNPACTXGCY

SEQ ID NO: 667 - protein, 18 aa, Artificial Sequence
  Synthetically generated peptide
  VARIANT (4)..(5): Xaa = Any Amino Acid
  misc_feature (6)..(6): Xaa can be any naturally occurring amino acid
  misc_feature (16)..(16): Xaa can be any naturally occurring amino acid
CCEXXXYCCNPACTGXCY

SEQ ID NO: 668 - protein, 18 aa, Artificial Sequence
  Synthetically generated peptide
  VARIANT (4)..(5): Xaa = Any Amino Acid
  misc_feature (6)..(6): Xaa can be any naturally occurring amino acid
  misc_feature (17)..(17): Xaa can be any naturally occurring amino acid
CCEXXXYCCNPACTGCXY

SEQ ID NO: 669 - protein, 17 aa, Artificial Sequence
  Synthetically generated peptide
  VARIANT (4)..(5): Xaa = Any Amino Acid
  misc_feature (7)..(7): Xaa can be any naturally occurring amino acid
CCEXXYXCCNPACTGCY

SEQ ID NO: 670 - protein, 18 aa, Artificial Sequence
  Synthetically generated peptide
  VARIANT (4)..(5): Xaa = Any Amino Acid
  misc_feature (7)..(8): Xaa can be any naturally occurring amino acid
CCEXXYXXCCNPACTGCY

SEQ ID NO: 671 - protein, 18 aa, Artificial Sequence
  Synthetically generated peptide
  VARIANT (4)..(5): Xaa = Any Amino Acid
  misc_feature (7)..(7): Xaa can be any naturally occurring amino acid
  misc_feature (10)..(10): Xaa can be any naturally occurring amino acid
CCEXXYXCCXNPACTGCY

SEQ ID NO: 672 - protein, 18 aa, Artificial Sequence
  Synthetically generated peptide
  VARIANT (4)..(5): Xaa = Any Amino Acid
  misc_feature (7)..(7): Xaa can be any naturally occurring amino acid
  misc_feature (11)..(11): Xaa can be any naturally occurring amino acid
CCEXXYXCCNXPACTGCY

SEQ ID NO: 673 - protein, 18 aa, Artificial Sequence
  Synthetically generated peptide
  VARIANT (4)..(5): Xaa = Any Amino Acid
  misc_feature (7)..(7): Xaa can be any naturally occurring amino acid
  misc_feature (12)..(12): Xaa can be any naturally occurring amino acid
CCEXXYXCCNPXACTGCY

SEQ ID NO: 674 - protein, 18 aa, Artificial Sequence
  Synthetically generated peptide
  VARIANT (4)..(5): Xaa = Any Amino Acid
  misc_feature (7)..(7): Xaa can be any naturally occurring amino acid
  misc_feature (13)..(13): Xaa can be any naturally occurring amino acid
CCEXXYXCCNPAXCTGCY

SEQ ID NO: 675 - protein, 18 aa, Artificial Sequence
  Synthetically generated peptide
  VARIANT (4)..(5): Xaa = Any Amino Acid
  misc_feature (7)..(7): Xaa can be any naturally occurring amino acid
  misc_feature (14)..(14): Xaa can be any naturally occurring amino acid
CCEXXYXCCNPACXTGCY

SEQ ID NO: 676 - protein, 18 aa, Artificial Sequence
  Synthetically generated peptide
  VARIANT (4)..(5): Xaa = Any Amino Acid
  misc_feature (7)..(7): Xaa can be any naturally occurring amino acid
  misc_feature (15)..(15): Xaa can be any naturally occurring amino acid
CCEXXYXCCNPACTXGCY

SEQ ID NO: 677 - protein, 18 aa, Artificial Sequence
  Synthetically generated peptide
  VARIANT (4)..(5): Xaa = Any Amino Acid
  misc_feature (7)..(7): Xaa can be any naturally occurring amino acid
  misc_feature (16)..(16): Xaa can be any naturally occurring amino acid
CCEXXYXCCNPACTGXCY

SEQ ID NO: 678 - protein, 18 aa, Artificial Sequence
  Synthetically generated peptide
  VARIANT (4)..(5): Xaa = Any Amino Acid
  misc_feature (7)..(7): Xaa can be any naturally occurring amino acid
  misc_feature (17)..(17): Xaa can be any naturally occurring amino acid
CCEXXYXCCNPACTGCXY

SEQ ID NO: 679 - protein, 17 aa, Artificial Sequence
  Synthetically generated peptide
  VARIANT (4)..(5): Xaa = Any Amino Acid
  misc_feature (9)..(9): Xaa can be any naturally occurring amino acid
CCEXXYCCXNPACTGCY

SEQ ID NO: 680 - protein, 18 aa, Artificial Sequence
  Synthetically generated peptide
  VARIANT (4)..(5): Xaa = Any Amino Acid
  misc_feature (9)..(10): Xaa can be any naturally occurring amino acid
CCEXXYCCXXNPACTGCY

SEQ ID NO: 681 - protein, 18 aa, Artificial Sequence
  Synthetically generated peptide
  VARIANT (4)..(5): Xaa = Any Amino Acid
  misc_feature (9)..(9): Xaa can be any naturally occurring amino acid
  misc_feature (11)..(11): Xaa can be any naturally occurring amino acid
CCEXXYCCXNXPACTGCY

SEQ ID NO: 682 - protein, 18 aa, Artificial Sequence
  Synthetically generated peptide
  VARIANT (4)..(5): Xaa = Any Amino Acid
  misc_feature (9)..(9): Xaa can be any naturally occurring amino acid
  misc_feature (12)..(12): Xaa can be any naturally occurring amino acid
CCEXXYCCXNPXACTGCY

SEQ ID NO: 683 - protein, 18 aa, Artificial Sequence
  Synthetically generated peptide
  VARIANT (4)..(5): Xaa = Any Amino Acid
  misc_feature (9)..(9): Xaa can be any naturally occurring amino acid
  misc_feature (13)..(13): Xaa can be any naturally occurring amino acid
CCEXXYCCXNPAXCTGCY

SEQ ID NO: 684 - protein, 18 aa, Artificial Sequence
  Synthetically generated peptide
  VARIANT (4)..(5): Xaa = Any Amino Acid
  misc_feature (9)..(9): Xaa can be any naturally occurring amino acid
  misc_feature (14)..(14): Xaa can be any naturally occurring amino acid
CCEXXYCCXNPACXTGCY

SEQ ID NO: 685 - protein, 18 aa, Artificial Sequence
  Synthetically generated peptide
  VARIANT (4)..(5): Xaa = Any Amino Acid
  misc_feature (9)..(9): Xaa can be any naturally occurring amino acid
  misc_feature (15)..(15): Xaa can be any naturally occurring amino acid
CCEXXYCCXNPACTXGCY

SEQ ID NO: 686 - protein, 18 aa, Artificial Sequence
  Synthetically generated peptide
  VARIANT (4)..(5): Xaa = Any Amino Acid
  misc_feature (9)..(9): Xaa can be any naturally occurring amino acid
  misc_feature (16)..(16): Xaa can be any naturally occurring amino acid
CCEXXYCCXNPACTGXCY

SEQ ID NO: 687 - protein, 18 aa, Artificial Sequence
  Synthetically generated peptide
  VARIANT (4)..(5): Xaa = Any Amino Acid
  misc_feature (9)..(9): Xaa can be any naturally occurring amino acid
  misc_feature (17)..(17): Xaa can be any naturally occurring amino acid
CCEXXYCCXNPACTGCXY

SEQ ID NO: 688 - protein, 17 aa, Artificial Sequence
  Synthetically generated peptide
  VARIANT (4)..(5): Xaa = Any Amino Acid
  misc_feature (10)..(10): Xaa can be any naturally occurring amino acid
CCEXXYCCNXPACTGCY

SEQ ID NO: 689 - protein, 18 aa, Artificial Sequence
  Synthetically generated peptide
  VARIANT (4)..(5): Xaa = Any Amino Acid
  misc_feature (10)..(11): Xaa can be any naturally occurring amino acid
CCEXXYCCNXXPACTGCY

SEQ ID NO: 690 - protein, 18 aa, Artificial Sequence
  Synthetically generated peptide
  VARIANT (4)..(5): Xaa = Any Amino Acid
  misc_feature (10)..(10): Xaa can be any naturally occurring amino acid
  misc_feature (12)..(12): Xaa can be any naturally occurring amino acid
CCEXXYCCNXPXACTGCY

SEQ ID NO: 691 - protein, 18 aa, Artificial Sequence
  Synthetically generated peptide
  VARIANT (4)..(5): Xaa = Any Amino Acid
  misc_feature (10)..(10): Xaa can be any naturally occurring amino acid
  misc_feature (13)..(13): Xaa can be any naturally occurring amino acid
CCEXXYCCNXPAXCTGCY

SEQ ID NO: 692 - protein, 18 aa, Artificial Sequence
  Synthetically generated peptide
  VARIANT (4)..(5): Xaa = Any Amino Acid
  misc_feature (10)..(10): Xaa can be any naturally occurring amino acid
  misc_feature (14)..(14): Xaa can be any naturally occurring amino acid
CCEXXYCCNXPACXTGCY

SEQ ID NO: 693 - protein, 18 aa, Artificial Sequence
  Synthetically generated peptide
  VARIANT (4)..(5): Xaa = Any Amino Acid
  misc_feature (10)..(10): Xaa can be any naturally occurring amino acid
  misc_feature (15)..(15): Xaa can be any naturally occurring amino acid
CCEXXYCCNXPACTXGCY

SEQ ID NO: 694 - protein, 18 aa, Artificial Sequence
  Synthetically generated peptide
  VARIANT (4)..(5): Xaa = Any Amino Acid
  misc_feature (10)..(10): Xaa can be any naturally occurring amino acid
  misc_feature (16)..(16): Xaa can be any naturally occurring amino acid
CCEXXYCCNXPACTGXCY

SEQ ID NO: 695 - protein, 18 aa, Artificial Sequence
  Synthetically generated peptide
  VARIANT (4)..(5): Xaa = Any Amino Acid
  misc_feature (10)..(10): Xaa can be any naturally occurring amino acid
  misc_feature (17)..(17): Xaa can be any naturally occurring amino acid
CCEXXYCCNXPACTGCXY

SEQ ID NO: 696 - protein, 17 aa, Artificial Sequence
  Synthetically generated peptide
  VARIANT (4)..(5): Xaa = Any Amino Acid
  misc_feature (11)..(11): Xaa can be any naturally occurring amino acid
CCEXXYCCNPXACTGCY

SEQ ID NO: 697 - protein, 18 aa, Artificial Sequence
  Synthetically generated peptide
  VARIANT (4)..(5): Xaa = Any Amino Acid
  misc_feature (11)..(12): Xaa can be any naturally occurring amino acid
CCEXXYCCNPXXACTGCY

SEQ ID NO: 698 - protein, 18 aa, Artificial Sequence
  Synthetically generated peptide
  VARIANT (4)..(5): Xaa = Any Amino Acid
  misc_feature (11)..(11): Xaa can be any naturally occurring amino acid
  misc_feature (13)..(13): Xaa can be any naturally occurring amino acid
CCEXXYCCNPXAXCTGCY

SEQ ID NO: 699 - protein, 18 aa, Artificial Sequence
  Synthetically generated peptide
  VARIANT (4)..(5): Xaa = Any Amino Acid
  misc_feature (11)..(11): Xaa can be any naturally occurring amino acid
  misc_feature (14)..(14): Xaa can be any naturally occurring amino acid
CCEXXYCCNPXACXTGCY

SEQ ID NO: 700 - protein, 18 aa, Artificial Sequence
  Synthetically generated peptide
  VARIANT (4)..(5): Xaa = Any Amino Acid
  misc_feature (11)..(11): Xaa can be any naturally occurring amino acid
  misc_feature (15)..(15): Xaa can be any naturally occurring amino acid
CCEXXYCCNPXACTXGCY

SEQ ID NO: 701 - protein, 18 aa, Artificial Sequence
  Synthetically generated peptide
  VARIANT (4)..(5): Xaa = Any Amino Acid
  misc_feature (11)..(11): Xaa can be any naturally occurring amino acid
  misc_feature (16)..(16): Xaa can be any naturally occurring amino acid
CCEXXYCCNPXACTGXCY

SEQ ID NO: 702 - protein, 18 aa, Artificial Sequence
  Synthetically generated peptide
  VARIANT (4)..(5): Xaa = Any Amino Acid
  misc_feature (11)..(11): Xaa can be any naturally occurring amino acid
  misc_feature (17)..(17): Xaa can be any naturally occurring amino acid
CCEXXYCCNPXACTGCXY

SEQ ID NO: 703 - protein, 17 aa, Artificial Sequence
  Synthetically generated peptide
  VARIANT (4)..(5): Xaa = Any Amino Acid
  misc_feature (12)..(12): Xaa can be any naturally occurring amino acid
CCEXXYCCNPAXCTGCY

SEQ ID NO: 704 - protein, 18 aa, Artificial Sequence
  Synthetically generated peptide
  VARIANT (4)..(5): Xaa = Any Amino Acid
  misc_feature (12)..(13): Xaa can be any naturally occurring amino acid
CCEXXYCCNPAXXCTGCY

SEQ ID NO: 705 - protein, 18 aa, Artificial Sequence
  Synthetically generated peptide
  VARIANT (4)..(5): Xaa = Any Amino Acid
  misc_feature (12)..(12): Xaa can be any naturally occurring amino acid
  misc_feature (14)..(14): Xaa can be any naturally occurring amino acid
CCEXXYCCNPAXCXTGCY

SEQ ID NO: 706 - protein, 18 aa, Artificial Sequence
  Synthetically generated peptide
  VARIANT (4)..(5): Xaa = Any Amino Acid
  misc_feature (12)..(12): Xaa can be any naturally occurring amino acid
  misc_feature (15)..(15): Xaa can be any naturally occurring amino acid
CCEXXYCCNPAXCTXGCY

SEQ ID NO: 707 - protein, 18 aa, Artificial Sequence
  Synthetically generated peptide
  VARIANT (4)..(5): Xaa = Any Amino Acid
  misc_feature (12)..(12): Xaa can be any naturally occurring amino acid
  misc_feature (16)..(16): Xaa can be any naturally occurring amino acid
CCEXXYCCNPAXCTGXCY

SEQ ID NO: 708 - protein, 18 aa, Artificial Sequence
  Synthetically generated peptide
  VARIANT (4)..(5): Xaa = Any Amino Acid
  misc_feature (12)..(12): Xaa can be any naturally occurring amino acid
  misc_feature (17)..(17): Xaa can be any naturally occurring amino acid
CCEXXYCCNPAXCTGCXY

SEQ ID NO: 709 - protein, 17 aa, Artificial Sequence
  Synthetically generated peptide
  VARIANT (4)..(5): Xaa = Any Amino Acid
  misc_feature (13)..(13): Xaa can be any naturally occurring amino acid
CCEXXYCCNPACXTGCY

SEQ ID NO: 710 - protein, 18 aa, Artificial Sequence
  Synthetically generated peptide
  VARIANT (4)..(5): Xaa = Any Amino Acid
  misc_feature (13)..(14): Xaa can be any naturally occurring amino acid
CCEXXYCCNPACXXTGCY

SEQ ID NO: 711 - protein, 18 aa, Artificial Sequence
  Synthetically generated peptide
  VARIANT (4)..(5): Xaa = Any Amino Acid
  misc_feature (13)..(13): Xaa can be any naturally occurring amino acid
  misc_feature (15)..(15): Xaa can be any naturally occurring amino acid
CCEXXYCCNPACXTXGCY

SEQ ID NO: 712 - protein, 18 aa, Artificial Sequence
  Synthetically generated peptide
  VARIANT (4)..(5): Xaa = Any Amino Acid
  misc_feature (13)..(13): Xaa can be any naturally occurring amino acid
  misc_feature (16)..(16): Xaa can be any naturally occurring amino acid
CCEXXYCCNPACXTGXCY

SEQ ID NO: 713 - protein, 18 aa, Artificial Sequence
  Synthetically generated peptide
  VARIANT (4)..(5): Xaa = Any Amino Acid
  misc_feature (13)..(13): Xaa can be any naturally occurring amino acid
  misc_feature (17)..(17): Xaa can be any naturally occurring amino acid
CCEXXYCCNPACXTGCXY

SEQ ID NO: 714 - protein, 17 aa, Artificial Sequence
  Synthetically generated peptide
  VARIANT (4)..(5): Xaa = Any Amino Acid
  misc_feature (14)..(14): Xaa can be any naturally occurring amino acid
CCEXXYCCNPACTXGCY

SEQ ID NO: 715 - protein, 18 aa, Artificial Sequence
  Synthetically generated peptide
  VARIANT (4)..(5): Xaa = Any Amino Acid
  misc_feature (14)..(15): Xaa can be any naturally occurring amino acid
CCEXXYCCNPACTXXGCY

SEQ ID NO: 716 - protein, 18 aa, Artificial Sequence
  Synthetically generated peptide
  VARIANT (4)..(5): Xaa = Any Amino Acid
  misc_feature (14)..(14): Xaa can be any naturally occurring amino acid
  misc_feature (16)..(16): Xaa can be any naturally occurring amino acid
CCEXXYCCNPACTXGXCY

SEQ ID NO: 717 - protein, 18 aa, Artificial Sequence
  Synthetically generated peptide
  VARIANT (4)..(5): Xaa = Any Amino Acid
  misc_feature (14)..(14): Xaa can be any naturally occurring amino acid
  misc_feature (17)..(17): Xaa can be any naturally occurring amino acid
CCEXXYCCNPACTXGCXY

SEQ ID NO: 718 - protein, 17 aa, Artificial Sequence
  Synthetically generated peptide
  VARIANT (4)..(5): Xaa = Any Amino Acid
  misc_feature (15)..(15): Xaa can be any naturally occurring amino acid
CCEXXYCCNPACTGXCY

SEQ ID NO: 719 - protein, 18 aa, Artificial Sequence
  Synthetically generated peptide
  VARIANT (4)..(5): Xaa = Any Amino Acid
  misc_feature (15)..(16): Xaa can be any naturally occurring amino acid
CCEXXYCCNPACTGXXCY

SEQ ID NO: 720 - protein, 18 aa, Artificial Sequence
  Synthetically generated peptide
  VARIANT (4)..(5): Xaa = Any Amino Acid
  misc_feature (15)..(15): Xaa can be any naturally occurring amino acid
  misc_feature (17)..(17): Xaa can be any naturally occurring amino acid
CCEXXYCCNPACTGXCXY

SEQ ID NO: 721 - protein, 17 aa, Artificial Sequence
  Synthetically generated peptide
  VARIANT (4)..(5): Xaa = Any Amino Acid
  misc_feature (16)..(16): Xaa can be any naturally occurring amino acid
CCEXXYCCNPACTGCXY

SEQ ID NO: 722 - protein, 18 aa, Artificial Sequence
  Synthetically generated peptide
  VARIANT (4)..(5): Xaa = Any Amino Acid
  misc_feature (16)..(17): Xaa can be any naturally occurring amino acid
CCEXXYCCNPACTGCXXY

SEQ ID NO: 723 - protein, 16 aa, Artificial Sequence
  Synthetically generated peptide
  VARIANT (4)..(6): Xaa = Any Amino Acid
CCEXYXCCNPACTGCY

SEQ ID NO: 724 - protein, 17 aa, Artificial Sequence
  Synthetically generated peptide
  VARIANT (4)..(6): Xaa = Any Amino Acid
  misc_feature (7)..(7): Xaa can be any naturally occurring amino acid
CCEXYXXCCNPACTGCY

SEQ ID NO: 725 - protein, 18 aa, Artificial Sequence
  Synthetically generated peptide
  VARIANT (4)..(6): Xaa = Any Amino Acid
  misc_feature (7)..(8): Xaa can be any naturally occurring amino acid
CCEXYXXXCCNPACTGCY

SEQ ID NO: 726 - protein, 18 aa, Artificial Sequence
  Synthetically generated peptide
  VARIANT (4)..(6): Xaa = Any Amino Acid
  misc_feature (7)..(7): Xaa can be any naturally occurring amino acid
  misc_feature (10)..(10): Xaa can be any naturally occurring amino acid
CCEXYXXCCXNPACTGCY

SEQ ID NO: 727 - protein, 18 aa, Artificial Sequence
  Synthetically generated peptide
  VARIANT (4)..(6): Xaa = Any Amino Acid
  misc_feature (7)..(7): Xaa can be any naturally occurring amino acid
  misc_feature (11)..(11): Xaa can be any naturally occurring amino acid
CCEXYXXCCNXPACTGCY

SEQ ID NO: 728 - protein, 18 aa, Artificial Sequence
  Synthetically generated peptide
  VARIANT (4)..(6): Xaa = Any Amino Acid
  misc_feature (7)..(7): Xaa can be any naturally occurring amino acid
  misc_feature (12)..(12): Xaa can be any naturally occurring amino acid
CCEXYXXCCNPXACTGCY

SEQ ID NO: 729 - protein, 18 aa, Artificial Sequence
  Synthetically generated peptide
  VARIANT (4)..(6): Xaa = Any Amino Acid
  misc_feature (7)..(7): Xaa can be any naturally occurring amino acid
  misc_feature (13)..(13): Xaa can be any naturally occurring amino acid
CCEXYXXCCNPAXCTGCY

SEQ ID NO: 730 - protein, 18 aa, Artificial Sequence
  Synthetically generated peptide
  VARIANT (4)..(6): Xaa = Any Amino Acid
  misc_feature (7)..(7): Xaa can be any naturally occurring amino acid
  misc_feature (14)..(14): Xaa can be any naturally occurring amino acid
CCEXYXXCCNPACXTGCY

SEQ ID NO: 731 - protein, 18 aa, Artificial Sequence
  Synthetically generated peptide
  VARIANT (4)..(6): Xaa = Any Amino Acid
  misc_feature (7)..(7): Xaa can be any naturally occurring amino acid
  misc_feature (15)..(15): Xaa can be any naturally occurring amino acid
CCEXYXXCCNPACTXGCY

SEQ ID NO: 732 - protein, 18 aa, Artificial Sequence
  Synthetically generated peptide
  VARIANT (4)..(6): Xaa = Any Amino Acid
  misc_feature (7)..(7): Xaa can be any naturally occurring amino acid
  misc_feature (16)..(16): Xaa can be any naturally occurring amino acid
CCEXYXXCCNPACTGXCY

SEQ ID NO: 733 - protein, 18 aa, Artificial Sequence
  Synthetically generated peptide
  VARIANT (4)..(6): Xaa = Any Amino Acid
  misc_feature (7)..(7): Xaa can be any naturally occurring amino acid
  misc_feature (17)..(17): Xaa can be any naturally occurring amino acid
CCEXYXXCCNPACTGCXY

SEQ ID NO: 734 - protein, 17 aa, Artificial Sequence
  Synthetically generated peptide
  VARIANT (4)..(6): Xaa = Any Amino Acid
  misc_feature (9)..(9): Xaa can be any naturally occurring amino acid
CCEXYXCCXNPACTGCY

SEQ ID NO: 735 - protein, 18 aa, Artificial Sequence
  Synthetically generated peptide
  VARIANT (4)..(6): Xaa = Any Amino Acid
  misc_feature (9)..(10): Xaa can be any naturally occurring amino acid
CCEXYXCCXXNPACTGCY

SEQ ID NO: 736 - protein, 18 aa, Artificial Sequence
  Synthetically generated peptide
  VARIANT (4)..(6): Xaa = Any Amino Acid
  misc_feature (9)..(9): Xaa can be any naturally occurring amino acid
  misc_feature (11)..(11): Xaa can be any naturally occurring amino acid
CCEXYXCCXNXPACTGCY

SEQ ID NO: 737 - protein, 18 aa, Artificial Sequence
  Synthetically generated peptide
  VARIANT (4)..(6): Xaa = Any Amino Acid
  misc_feature (9)..(9): Xaa can be any naturally occurring amino acid
  misc_feature (12)..(12): Xaa can be any naturally occurring amino acid
CCEXYXCCXNPXACTGCY

SEQ ID NO: 738 - protein, 18 aa, Artificial Sequence
  Synthetically generated peptide
  VARIANT (4)..(6): Xaa = Any Amino Acid
  misc_feature (9)..(9): Xaa can be any naturally occurring amino acid
  misc_feature (13)..(13): Xaa can be any naturally occurring amino acid
CCEXYXCCXNPAXCTGCY

SEQ ID NO: 739 - protein, 18 aa, Artificial Sequence
  Synthetically generated peptide
  VARIANT (4)..(6): Xaa = Any Amino Acid
  misc_feature (9)..(9): Xaa can be any naturally occurring amino acid
  misc_feature (14)..(14): Xaa can be any naturally occurring amino acid
CCEXYXCCXNPACXTGCY

SEQ ID NO: 740 - protein, 18 aa, Artificial Sequence
  Synthetically generated peptide
  VARIANT (4)..(6): Xaa = Any Amino Acid
  misc_feature (9)..(9): Xaa can be any naturally occurring amino acid
  misc_feature (15)..(15): Xaa can be any naturally occurring amino acid
CCEXYXCCXNPACTXGCY

SEQ ID NO: 741 - protein, 18 aa, Artificial Sequence
  Synthetically generated peptide
  VARIANT (4)..(6): Xaa = Any Amino Acid
  misc_feature (9)..(9): Xaa can be any naturally occurring amino acid
  misc_feature (16)..(16): Xaa can be any naturally occurring amino acid
CCEXYXCCXNPACTGXCY

SEQ ID NO: 742 - protein, 18 aa, Artificial Sequence
  Synthetically generated peptide
  VARIANT (4)..(6): Xaa = Any Amino Acid
  misc_feature (9)..(9): Xaa can be any naturally occurring amino acid
  misc_feature (17)..(17): Xaa can be any naturally occurring amino acid
CCEXYXCCXNPACTGCXY

SEQ ID NO: 743 - protein, 17 aa, Artificial Sequence
  Synthetically generated peptide
  VARIANT (4)..(6): Xaa = Any Amino Acid
  misc_feature (10)..(10): Xaa can be any naturally occurring amino acid
CCEXYXCCNXPACTGCY

SEQ ID NO: 744 - protein, 18 aa, Artificial Sequence
  Synthetically generated peptide
  VARIANT (4)..(6): Xaa = Any Amino Acid
  misc_feature (10)..(11): Xaa can be any naturally occurring amino acid
CCEXYXCCNXXPACTGCY

SEQ ID NO: 745 - protein, 18 aa, Artificial Sequence
  Synthetically generated peptide
  VARIANT (4)..(6): Xaa = Any Amino Acid
  misc_feature (10)..(10): Xaa can be any naturally occurring amino acid
  misc_feature (12)..(12): Xaa can be any naturally occurring amino acid
CCEXYXCCNXPXACTGCY

SEQ ID NO: 746 - protein, 18 aa, Artificial Sequence
  Synthetically generated peptide
  VARIANT (4)..(6): Xaa = Any Amino Acid
  misc_feature (10)..(10): Xaa can be any naturally occurring amino acid
  misc_feature (13)..(13): Xaa can be any naturally occurring amino acid
CCEXYXCCNXPAXCTGCY

SEQ ID NO: 747 - protein, 18 aa, Artificial Sequence
  Synthetically generated peptide
  VARIANT (4)..(6): Xaa = Any Amino Acid
  misc_feature (10)..(10): Xaa can be any naturally occurring amino acid
  misc_feature (14)..(14): Xaa can be any naturally occurring amino acid
CCEXYXCCNXPACXTGCY

SEQ ID NO: 748 - protein, 18 aa, Artificial Sequence
  Synthetically generated peptide
  VARIANT (4)..(6): Xaa = Any Amino Acid
  misc_feature (10)..(10): Xaa can be any naturally occurring amino acid
  misc_feature (15)..(15): Xaa can be any naturally occurring amino acid
CCEXYXCCNXPACTXGCY

SEQ ID NO: 749 - protein, 18 aa, Artificial Sequence
  Synthetically generated peptide
  VARIANT (4)..(6): Xaa = Any Amino Acid
  misc_feature (10)..(10): Xaa can be any naturally occurring amino acid
  misc_feature (16)..(16): Xaa can be any naturally occurring amino acid
CCEXYXCCNXPACTGXCY

SEQ ID NO: 750 - protein, 18 aa, Artificial Sequence
  Synthetically generated peptide
  VARIANT (4)..(6): Xaa = Any Amino Acid
  misc_feature (10)..(10): Xaa can be any naturally occurring amino acid
  misc_feature (17)..(17): Xaa can be any naturally occurring amino acid
CCEXYXCCNXPACTGCXY

SEQ ID NO: 751 - protein, 17 aa, Artificial Sequence
  Synthetically generated peptide
  VARIANT (4)..(6): Xaa = Any Amino Acid
  misc_feature (11)..(11): Xaa can be any naturally occurring amino acid
CCEXYXCCNPXACTGCY

SEQ ID NO: 752 - protein, 18 aa, Artificial Sequence
  Synthetically generated peptide
  VARIANT (4)..(6): Xaa = Any Amino Acid
  misc_feature (11)..(12): Xaa can be any naturally occurring amino acid
CCEXYXCCNPXXACTGCY

SEQ ID NO: 753 - protein, 18 aa, Artificial Sequence
  Synthetically generated peptide
  VARIANT (4)..(6): Xaa = Any Amino Acid
  misc_feature (11)..(11): Xaa can be any naturally occurring amino acid
  misc_feature (13)..(13): Xaa can be any naturally occurring amino acid
CCEXYXCCNPXAXCTGCY

SEQ ID NO: 754 - protein, 18 aa, Artificial Sequence
  Synthetically generated peptide
  VARIANT (4)..(6): Xaa = Any Amino Acid
  misc_feature (11)..(11): Xaa can be any naturally occurring amino acid
  misc_feature (14)..(14): Xaa can be any naturally occurring amino acid
CCEXYXCCNPXACXTGCY

SEQ ID NO: 755 - protein, 18 aa, Artificial Sequence
  Synthetically generated peptide
  VARIANT (4)..(6): Xaa = Any Amino Acid
  misc_feature (11)..(11): Xaa can be any naturally occurring amino acid
  misc_feature (15)..(15): Xaa can be any naturally occurring amino acid
CCEXYXCCNPXACTXGCY

SEQ ID NO: 756 - protein, 18 aa, Artificial Sequence
  Synthetically generated peptide
  VARIANT (4)..(6): Xaa = Any Amino Acid
  misc_feature (11)..(11): Xaa can be any naturally occurring amino acid
  misc_feature (16)..(16): Xaa can be any naturally occurring amino acid
CCEXYXCCNPXACTGXCY

SEQ ID NO: 757 - protein, 18 aa, Artificial Sequence
  Synthetically generated peptide
  VARIANT (4)..(6): Xaa = Any Amino Acid
  misc_feature (11)..(11): Xaa can be any naturally occurring amino acid
  misc_feature (17)..(17): Xaa can be any naturally occurring amino acid
CCEXYXCCNPXACTGCXY

SEQ ID NO: 758 - protein, 17 aa, Artificial Sequence
  Synthetically generated peptide
  VARIANT (4)..(6): Xaa = Any Amino Acid
  misc_feature (12)..(12): Xaa can be any naturally occurring amino acid
CCEXYXCCNPAXCTGCY

SEQ ID NO: 759 - protein, 18 aa, Artificial Sequence
  Synthetically generated peptide
  VARIANT (4)..(6): Xaa = Any Amino Acid
  misc_feature (12)..(13): Xaa can be any naturally occurring amino acid
CCEXYXCCNPAXXCTGCY

SEQ ID NO: 760 - protein, 18 aa, Artificial Sequence
  Synthetically generated peptide
  VARIANT (4)..(6): Xaa = Any Amino Acid
  misc_feature (12)..(12): Xaa can be any naturally occurring amino acid
  misc_feature (14)..(14): Xaa can be any naturally occurring amino acid
CCEXYXCCNPAXCXTGCY

SEQ ID NO: 761 - protein, 18 aa, Artificial Sequence
  Synthetically generated peptide
  VARIANT (4)..(6): Xaa = Any Amino Acid
  misc_feature (12)..(12): Xaa can be any naturally occurring amino acid
  misc_feature (15)..(15): Xaa can be any naturally occurring amino acid
CCEXYXCCNPAXCTXGCY

SEQ ID NO: 762 - protein, 18 aa, Artificial Sequence
  Synthetically generated peptide
  VARIANT (4)..(6): Xaa = Any Amino Acid
  misc_feature (12)..(12): Xaa can be any naturally occurring amino acid
  misc_feature (16)..(16): Xaa can be any naturally occurring amino acid
CCEXYXCCNPAXCTGXCY

SEQ ID NO: 763 - protein, 18 aa, Artificial Sequence
  Synthetically generated peptide
  VARIANT (4)..(6): Xaa = Any Amino Acid
  misc_feature (12)..(12): Xaa can be any naturally occurring amino acid
  misc_feature (17)..(17): Xaa can be any naturally occurring amino acid
CCEXYXCCNPAXCTGCXY

SEQ ID NO: 764 - protein, 17 aa, Artificial Sequence
  Synthetically generated peptide
  VARIANT (4)..(6): Xaa = Any Amino Acid
  misc_feature (13)..(13): Xaa can be any naturally occurring amino acid
CCEXYXCCNPACXTGCY

SEQ ID NO: 765 - protein, 18 aa, Artificial Sequence
  Synthetically generated peptide
  VARIANT (4)..(6): Xaa = Any Amino Acid
  misc_feature (13)..(14): Xaa can be any naturally occurring amino acid
CCEXYXCCNPACXXTGCY

SEQ ID NO: 766 - protein, 18 aa, Artificial Sequence
  Synthetically generated peptide
  VARIANT (4)..(6): Xaa = Any Amino Acid
  misc_feature (13)..(13): Xaa can be any naturally occurring amino acid
  misc_feature (15)..(15): Xaa can be any naturally occurring amino acid
CCEXYXCCNPACXTXGCY

SEQ ID NO: 767 - protein, 18 aa, Artificial Sequence
  Synthetically generated peptide
  VARIANT (4)..(6): Xaa = Any Amino Acid
  misc_feature (13)..(13): Xaa can be any naturally occurring amino acid
  misc_feature (16)..(16): Xaa can be any naturally occurring amino acid
CCEXYXCCNPACXTGXCY

SEQ ID NO: 768 - protein, 18 aa, Artificial Sequence
  Synthetically generated peptide
  VARIANT (4)..(6): Xaa = Any Amino Acid
  misc_feature (13)..(13): Xaa can be any naturally occurring amino acid
  misc_feature (17)..(17): Xaa can be any naturally occurring amino acid
CCEXYXCCNPACXTGCXY

SEQ ID NO: 769 - protein, 17 aa, Artificial Sequence
  Synthetically generated peptide
  VARIANT (4)..(6): Xaa = Any Amino Acid
  misc_feature (14)..(14): Xaa can be any naturally occurring amino acid
CCEXYXCCNPACTXGCY

SEQ ID NO: 770 - protein, 18 aa, Artificial Sequence
  Synthetically generated peptide
  VARIANT (4)..(6): Xaa = Any Amino Acid
  misc_feature (14)..(15): Xaa can be any naturally occurring amino acid
CCEXYXCCNPACTXXGCY

SEQ ID NO: 771 - protein, 18 aa, Artificial Sequence
  Synthetically generated peptide
  VARIANT (4)..(6): Xaa = Any Amino Acid
  misc_feature (14)..(14): Xaa can be any naturally occurring amino acid
  misc_feature (16)..(16): Xaa can be any naturally occurring amino acid
CCEXYXCCNPACTXGXCY

SEQ ID NO: 772 - protein, 18 aa, Artificial Sequence
  Synthetically generated peptide
  VARIANT (4)..(6): Xaa = Any Amino Acid
  misc_feature (14)..(14): Xaa can be any naturally occurring amino acid
  misc_feature (17)..(17): Xaa can be any naturally occurring amino acid
CCEXYXCCNPACTXGCXY

SEQ ID NO: 773 - protein, 17 aa, Artificial Sequence
  Synthetically generated peptide
  VARIANT (4)..(6): Xaa = Any Amino Acid
  misc_feature (15)..(15): Xaa can be any naturally occurring amino acid
CCEXYXCCNPACTGXCY

SEQ ID NO: 774 - protein, 18 aa, Artificial Sequence
  Synthetically generated peptide
  VARIANT (4)..(6): Xaa = Any Amino Acid
  misc_feature (15)..(16): Xaa can be any naturally occurring amino acid
CCEXYXCCNPACTGXXCY

SEQ ID NO: 775 - protein, 18 aa, Artificial Sequence
  Synthetically generated peptide
  VARIANT (4)..(6): Xaa = Any Amino Acid
  misc_feature (15)..(15): Xaa can be any naturally occurring amino acid
  misc_feature (17)..(17): Xaa can be any naturally occurring amino acid
CCEXYXCCNPACTGXCXY

SEQ ID NO: 776 - protein, 17 aa, Artificial Sequence
  Synthetically generated peptide
  VARIANT (4)..(6): Xaa = Any Amino Acid
  misc_feature (16)..(16): Xaa can be any naturally occurring amino acid
CCEXYXCCNPACTGCXY

SEQ ID NO: 777 - protein, 18 aa, Artificial Sequence
  Synthetically generated peptide
  VARIANT (4)..(6): Xaa = Any Amino Acid
  misc_feature (16)..(17): Xaa can be any naturally occurring amino acid
CCEXYXCCNPACTGCXXY

SEQ ID NO: 778 - protein, 16 aa, Artificial Sequence
  Synthetically generated peptide
  VARIANT (4)..(8): Xaa = Any Amino Acid
CCEXYCCXNPACTGCY

SEQ ID NO: 779 - protein, 17 aa, Artificial Sequence
  Synthetically generated peptide
  VARIANT (4)..(8): Xaa = Any Amino Acid
  misc_feature (9)..(9): Xaa can be any naturally occurring amino acid
CCEXYCCXXNPACTGCY

SEQ ID NO: 780 - protein, 18 aa, Artificial Sequence
  Synthetically generated peptide
  VARIANT (4)..(8): Xaa = Any Amino Acid
  misc_feature (9)..(10): Xaa can be any naturally occurring amino acid
CCEXYCCXXXNPACTGCY

SEQ ID NO: 781 - protein, 18 aa, Artificial Sequence
  Synthetically generated peptide
  VARIANT (4)..(8): Xaa = Any Amino Acid
  misc_feature (9)..(9): Xaa can be any naturally occurring amino acid
  misc_feature (11)..(11): Xaa can be any naturally occurring amino acid
CCEXYCCXXNXPACTGCY

SEQ ID NO: 782 - protein, 18 aa, Artificial Sequence
  Synthetically generated peptide
  VARIANT (4)..(8): Xaa = Any Amino Acid
  misc_feature (9)..(9): Xaa can be any naturally occurring amino acid
  misc_feature (12)..(12): Xaa can be any naturally occurring amino acid
CCEXYCCXXNPXACTGCY

SEQ ID NO: 783 - protein, 18 aa, Artificial Sequence
  Synthetically generated peptide
  VARIANT (4)..(8): Xaa = Any Amino Acid
  misc_feature (9)..(9): Xaa can be any naturally occurring amino acid
  misc_feature (13)..(13): Xaa can be any naturally occurring amino acid
CCEXYCCXXNPAXCTGCY

SEQ ID NO: 784 - protein, 18 aa, Artificial Sequence
  Synthetically generated peptide
  VARIANT (4)..(8): Xaa = Any Amino Acid
  misc_feature (9)..(9): Xaa can be any naturally occurring amino acid
  misc_feature (14)..(14): Xaa can be any naturally occurring amino acid
CCEXYCCXXNPACXTGCY

SEQ ID NO: 785 - protein, 18 aa, Artificial Sequence
  Synthetically generated peptide
  VARIANT (4)..(8): Xaa = Any Amino Acid
  misc_feature (9)..(9): Xaa can be any naturally occurring amino acid
  misc_feature (15)..(15): Xaa can be any naturally occurring amino acid
CCEXYCCXXNPACTXGCY

SEQ ID NO: 786 - protein, 18 aa, Artificial Sequence
  Synthetically generated peptide
  VARIANT (4)..(8): Xaa = Any Amino Acid
  misc_feature (9)..(9): Xaa can be any naturally occurring amino acid
  misc_feature (16)..(16): Xaa can be any naturally occurring amino acid
CCEXYCCXXNPACTGXCY

SEQ ID NO: 787 - protein, 18 aa, Artificial Sequence
  Synthetically generated peptide
  VARIANT (4)..(8): Xaa = Any Amino Acid
  misc_feature (9)..(9): Xaa can be any naturally occurring amino acid
  misc_feature (17)..(17): Xaa can be any naturally occurring amino acid
CCEXYCCXXNPACTGCXY

SEQ ID NO: 788 - protein, 17 aa, Artificial Sequence
  Synthetically generated peptide
  VARIANT (4)..(8): Xaa = Any Amino Acid
  misc_feature (10)..(10): Xaa can be any naturally occurring amino acid
CCEXYCCXNXPACTGCY

SEQ ID NO: 789 - protein, 18 aa, Artificial Sequence
  Synthetically generated peptide
  VARIANT (4)..(8): Xaa = Any Amino Acid
  misc_feature (10)..(11): Xaa can be any naturally occurring amino acid
CCEXYCCXNXXPACTGCY

SEQ ID NO: 790 - protein, 18 aa, Artificial Sequence
  Synthetically generated peptide
  VARIANT (4)..(8): Xaa = Any Amino Acid
  misc_feature (10)..(10): Xaa can be any naturally occurring amino acid
  misc_feature (12)..(12): Xaa can be any naturally occurring amino acid
CCEXYCCXNXPXACTGCY

SEQ ID NO: 791 - protein, 18 aa, Artificial Sequence
  Synthetically generated peptide
  VARIANT (4)..(8): Xaa = Any Amino Acid
  misc_feature (10)..(10): Xaa can be any naturally occurring amino acid
  misc_feature (13)..(13): Xaa can be any naturally occurring amino acid
CCEXYCCXNXPAXCTGCY

SEQ ID NO: 792 - protein, 18 aa, Artificial Sequence
  Synthetically generated peptide
  VARIANT (4)..(8): Xaa = Any Amino Acid
  misc_feature (10)..(10): Xaa can be any naturally occurring amino acid
  misc_feature (14)..(14): Xaa can be any naturally occurring amino acid
CCEXYCCXNXPACXTGCY

SEQ ID NO: 793 - protein, 18 aa, Artificial Sequence
  Synthetically generated peptide
  VARIANT (4)..(8): Xaa = Any Amino Acid
  misc_feature (10)..(10): Xaa can be any naturally occurring amino acid
  misc_feature (15)..(15): Xaa can be any naturally occurring amino acid
CCEXYCCXNXPACTXGCY

SEQ ID NO: 794 - protein, 18 aa, Artificial Sequence
  Synthetically generated peptide
  VARIANT (4)..(8): Xaa = Any Amino Acid
  misc_feature (10)..(10): Xaa can be any naturally occurring amino acid
  misc_feature (16)..(16): Xaa can be any naturally occurring amino acid
CCEXYCCXNXPACTGXCY

SEQ ID NO: 795 - protein, 18 aa, Artificial Sequence
  Synthetically generated peptide
  VARIANT (4)..(8): Xaa = Any Amino Acid
  misc_feature (10)..(10): Xaa can be any naturally occurring amino acid
  misc_feature (17)..(17): Xaa can be any naturally occurring amino acid
CCEXYCCXNXPACTGCXY

SEQ ID NO: 796 - protein, 17 aa, Artificial Sequence
  Synthetically generated peptide
  VARIANT (4)..(8): Xaa = Any Amino Acid
  misc_feature (11)..(11): Xaa can be any naturally occurring amino acid
CCEXYCCXNPXACTGCY

SEQ ID NO: 797 - protein, 18 aa, Artificial Sequence
  Synthetically generated peptide
  VARIANT (4)..(8): Xaa = Any Amino Acid
  misc_feature (11)..(12): Xaa can be any naturally occurring amino acid
CCEXYCCXNPXXACTGCY

SEQ ID NO: 798 - protein, 18 aa, Artificial Sequence
  Synthetically generated peptide
  VARIANT (4)..(8): Xaa = Any Amino Acid
  misc_feature (11)..(11): Xaa can be any naturally occurring amino acid
  misc_feature (13)..(13): Xaa can be any naturally occurring amino acid
CCEXYCCXNPXAXCTGCY

SEQ ID NO: 799 - protein, 18 aa, Artificial Sequence
  Synthetically generated peptide
  VARIANT (4)..(8): Xaa = Any Amino Acid
  misc_feature (11)..(11): Xaa can be any naturally occurring amino acid
  misc_feature (14)..(14): Xaa can be any naturally occurring amino acid
CCEXYCCXNPXACXTGCY

SEQ ID NO: 800 - protein, 18 aa, Artificial Sequence
  Synthetically generated peptide
  VARIANT (4)..(8): Xaa = Any Amino Acid
  misc_feature (11)..(11): Xaa can be any naturally occurring amino acid
  misc_feature (15)..(15): Xaa can be any naturally occurring amino acid
CCEXYCCXNPXACTXGCY

SEQ ID NO: 801 - protein, 18 aa, Artificial Sequence
  Synthetically generated peptide
  VARIANT (4)..(8): Xaa = Any Amino Acid
  misc_feature (11)..(11): Xaa can be any naturally occurring amino acid
  misc_feature (16)..(16): Xaa can be any naturally occurring amino acid
CCEXYCCXNPXACTGXCY

SEQ ID NO: 802 - protein, 18 aa, Artificial Sequence
  Synthetically generated peptide
  VARIANT (4)..(8): Xaa = Any Amino Acid
  misc_feature (11)..(11): Xaa can be any naturally occurring amino acid
  misc_feature (17)..(17): Xaa can be any naturally occurring amino acid
CCEXYCCXNPXACTGCXY

SEQ ID NO: 803 - protein, 17 aa, Artificial Sequence
  Synthetically generated peptide
  VARIANT (4)..(8): Xaa = Any Amino Acid
  misc_feature (12)..(12): Xaa can be any naturally occurring amino acid
CCEXYCCXNPAXCTGCY

SEQ ID NO: 804 - protein, 18 aa, Artificial Sequence
  Synthetically generated peptide
  VARIANT (4)..(8): Xaa = Any Amino Acid
  misc_feature (12)..(13): Xaa can be any naturally occurring amino acid
CCEXYCCXNPAXXCTGCY

SEQ ID NO: 805 - protein, 18 aa, Artificial Sequence
  Synthetically generated peptide
  VARIANT (4)..(8): Xaa = Any Amino Acid
  misc_feature (12)..(12): Xaa can be any naturally occurring amino acid
  misc_feature (14)..(14): Xaa can be any naturally occurring amino acid
CCEXYCCXNPAXCXTGCY

SEQ ID NO: 806 - protein, 18 aa, Artificial Sequence
  Synthetically generated peptide
  VARIANT (4)..(8): Xaa = Any Amino Acid
  misc_feature (12)..(12): Xaa can be any naturally occurring amino acid
  misc_feature (15)..(15): Xaa can be any naturally occurring amino acid
CCEXYCCXNPAXCTXGCY

SEQ ID NO: 807 - protein, 18 aa, Artificial Sequence
  Synthetically generated peptide
  VARIANT (4)..(8): Xaa = Any Amino Acid
  misc_feature (12)..(12): Xaa can be any naturally occurring amino acid
  misc_feature (16)..(16): Xaa can be any naturally occurring amino acid
CCEXYCCXNPAXCTGXCY

SEQ ID NO: 808 - protein, 18 aa, Artificial Sequence
  Synthetically generated peptide
  VARIANT (4)..(8): Xaa = Any Amino Acid
  misc_feature (12)..(12): Xaa can be any naturally occurring amino acid
  misc_feature (17)..(17): Xaa can be any naturally occurring amino acid
CCEXYCCXNPAXCTGCXY

SEQ ID NO: 809 - protein, 17 aa, Artificial Sequence
  Synthetically generated peptide
  VARIANT (4)..(8): Xaa = Any Amino Acid
  misc_feature (13)..(13): Xaa can be any naturally occurring amino acid
CCEXYCCXNPACXTGCY

SEQ ID NO: 810 - protein, 18 aa, Artificial Sequence
  Synthetically generated peptide
  VARIANT (4)..(8): Xaa = Any Amino Acid
  misc_feature (13)..(14): Xaa can be any naturally occurring amino acid
CCEXYCCXNPACXXTGCY

SEQ ID NO: 811 - protein, 18 aa, Artificial Sequence
  Synthetically generated peptide
  VARIANT (4)..(8): Xaa = Any Amino Acid
  misc_feature (13)..(13): Xaa can be any naturally occurring amino acid
  misc_feature (15)..(15): Xaa can be any naturally occurring amino acid
CCEXYCCXNPACXTXGCY

SEQ ID NO: 812 - protein, 18 aa, Artificial Sequence
  Synthetically generated peptide
  VARIANT (4)..(8): Xaa = Any Amino Acid
  misc_feature (13)..(13): Xaa can be any naturally occurring amino acid
  misc_feature (16)..(16): Xaa can be any naturally occurring amino acid
CCEXYCCXNPACXTGXCY

SEQ ID NO: 813 - protein, 18 aa, Artificial Sequence
  Synthetically generated peptide
  VARIANT (4)..(8): Xaa = Any Amino Acid
  misc_feature (13)..(13): Xaa can be any naturally occurring amino acid
  misc_feature (17)..(17): Xaa can be any naturally occurring amino acid
CCEXYCCXNPACXTGCXY

SEQ ID NO: 814 - protein, 17 aa, Artificial Sequence
  Synthetically generated peptide
  VARIANT (4)..(8): Xaa = Any Amino Acid
  misc_feature (14)..(14): Xaa can be any naturally occurring amino acid
CCEXYCCXNPACTXGCY

SEQ ID NO: 815 - protein, 18 aa, Artificial Sequence
  Synthetically generated peptide
  VARIANT (4)..(8): Xaa = Any Amino Acid
  misc_feature (14)..(15): Xaa can be any naturally occurring amino acid
CCEXYCCXNPACTXXGCY

SEQ ID NO: 816 - protein, 18 aa, Artificial Sequence
  Synthetically generated peptide
  VARIANT (4)..(8): Xaa = Any Amino Acid
  misc_feature (14)..(14): Xaa can be any naturally occurring amino acid
  misc_feature (16)..(16): Xaa can be any naturally occurring amino acid
CCEXYCCXNPACTXGXCY

SEQ ID NO: 817 - protein, 18 aa, Artificial Sequence
  Synthetically generated peptide
  VARIANT (4)..(8): Xaa = Any Amino Acid
  misc_feature (14)..(14): Xaa can be any naturally occurring amino acid
  misc_feature (17)..(17): Xaa can be any naturally occurring amino acid
CCEXYCCXNPACTXGCXY

SEQ ID NO: 818 - protein, 17 aa, Artificial Sequence
  Synthetically generated peptide
  VARIANT (4)..(8): Xaa = Any Amino Acid
  misc_feature (15)..(15): Xaa can be any naturally occurring amino acid
CCEXYCCXNPACTGXCY

SEQ ID NO: 819 - protein, 18 aa, Artificial Sequence
  Synthetically generated peptide
  VARIANT (4)..(8): Xaa = Any Amino Acid
  misc_feature (15)..(16): Xaa can be any naturally occurring amino acid
CCEXYCCXNPACTGXXCY

SEQ ID NO: 820 - protein, 18 aa, Artificial Sequence
  Synthetically generated peptide
  VARIANT (4)..(8): Xaa = Any Amino Acid
  misc_feature (15)..(15): Xaa can be any naturally occurring amino acid
  misc_feature (17)..(17): Xaa can be any naturally occurring amino acid
CCEXYCCXNPACTGXCXY

SEQ ID NO: 821 - protein, 17 aa, Artificial Sequence
  Synthetically generated peptide
  VARIANT (4)..(8): Xaa = Any Amino Acid
  misc_feature (16)..(16): Xaa can be any naturally occurring amino acid
CCEXYCCXNPACTGCXY

SEQ ID NO: 822 - protein, 18 aa, Artificial Sequence
  Synthetically generated peptide
  VARIANT (4)..(8): Xaa = Any Amino Acid
  misc_feature (16)..(17): Xaa can be any naturally occurring amino acid
CCEXYCCXNPACTGCXXY

SEQ ID NO: 823 - protein, 16 aa, Artificial Sequence
  Synthetically generated peptide
  VARIANT (1)..(16): Xaa = Any Amino Acid
  VARIANT (4)..(9): Xaa = Any Amino Acid
CCEXYCCNXPACTGCY

SEQ ID NO: 824 - protein, 17 aa, Artificial Sequence
  Synthetically generated peptide
  VARIANT (4)..(9): Xaa = Any Amino Acid
  misc_feature (10)..(10): Xaa can be any naturally occurring amino acid
CCEXYCCNXXPACTGCY

SEQ ID NO: 825 - protein, 18 aa, Artificial Sequence
  Synthetically generated peptide
  VARIANT (4)..(9): Xaa = Any Amino Acid
  misc_feature (10)..(11): Xaa can be any naturally occurring amino acid
CCEXYCCNXXXPACTGCY

SEQ ID NO: 826 - protein, 18 aa, Artificial Sequence
  Synthetically generated peptide
  VARIANT (4)..(9): Xaa = Any Amino Acid
  misc_feature (10)..(10): Xaa can be any naturally occurring amino acid
  misc_feature (12)..(12): Xaa can be any naturally occurring amino acid
CCEXYCCNXXPXACTGCY

SEQ ID NO: 827 - protein, 18 aa, Artificial Sequence
  Synthetically generated peptide
  VARIANT (4)..(9): Xaa = Any Amino Acid
  misc_feature (10)..(10): Xaa can be any naturally occurring amino acid
  misc_feature (13)..(13): Xaa can be any naturally occurring amino acid
CCEXYCCNXXPAXCTGCY

SEQ ID NO: 828 - protein, 18 aa, Artificial Sequence
  Synthetically generated peptide
  VARIANT (4)..(9): Xaa = Any Amino Acid
  misc_feature (10)..(10): Xaa can be any naturally occurring amino acid
  misc_feature (14)..(14): Xaa can be any naturally occurring amino acid
CCEXYCCNXXPACXTGCY

SEQ ID NO: 829 - protein, 18 aa, Artificial Sequence
  Synthetically generated peptide
  VARIANT (4)..(9): Xaa = Any Amino Acid
  misc_feature (10)..(10): Xaa can be any naturally occurring amino acid
  misc_feature (15)..(15): Xaa can be any naturally occurring amino acid
CCEXYCCNXXPACTXGCY

SEQ ID NO: 830 - protein, 18 aa, Artificial Sequence
  Synthetically generated peptide
  VARIANT (4)..(9): Xaa = Any Amino Acid
  misc_feature (10)..(10): Xaa can be any naturally occurring amino acid
  misc_feature (16)..(16): Xaa can be any naturally occurring amino acid
CCEXYCCNXXPACTGXCY

SEQ ID NO: 831 - protein, 18 aa, Artificial Sequence
  Synthetically generated peptide
  VARIANT (4)..(9): Xaa = Any Amino Acid
  misc_feature (10)..(10): Xaa can be any naturally occurring amino acid
  misc_feature (17)..(17): Xaa can be any naturally occurring amino acid
CCEXYCCNXXPACTGCXY

SEQ ID NO: 832 - protein, 17 aa, Artificial Sequence
  Synthetically generated peptide
  VARIANT (4)..(9): Xaa = Any Amino Acid
  misc_feature (11)..(11): Xaa can be any naturally occurring amino acid
CCEXYCCNXPXACTGCY

SEQ ID NO: 833 - protein, 18 aa, Artificial Sequence
  Synthetically generated peptide
  VARIANT (4)..(9): Xaa = Any Amino Acid
  misc_feature (11)..(12): Xaa can be any naturally occurring amino acid
CCEXYCCNXPXXACTGCY

SEQ ID NO: 834 - protein, 18 aa, Artificial Sequence
  Synthetically generated peptide
  VARIANT (4)..(9): Xaa = Any Amino Acid
  misc_feature (11)..(11): Xaa can be any naturally occurring amino acid
  misc_feature (13)..(13): Xaa can be any naturally occurring amino acid
CCEXYCCNXPXAXCTGCY

SEQ ID NO: 835 - protein, 18 aa, Artificial Sequence
  Synthetically generated peptide
  VARIANT (4)..(9): Xaa = Any Amino Acid
  misc_feature (11)..(11): Xaa can be any naturally occurring amino acid
  misc_feature (14)..(14): Xaa can be any naturally occurring amino acid
CCEXYCCNXPXACXTGCY

SEQ ID NO: 836 - protein, 18 aa, Artificial Sequence
  Synthetically generated peptide
  VARIANT (4)..(9): Xaa = Any Amino Acid
  misc_feature (11)..(11): Xaa can be any naturally occurring amino acid
  misc_feature (15)..(15): Xaa can be any naturally occurring amino acid
CCEXYCCNXPXACTXGCY

SEQ ID NO: 837 - protein, 18 aa, Artificial Sequence
  Synthetically generated peptide
  VARIANT (4)..(9): Xaa = Any Amino Acid
  misc_feature (11)..(11): Xaa can be any naturally occurring amino acid
  misc_feature (16)..(16): Xaa can be any naturally occurring amino acid
CCEXYCCNXPXACTGXCY

SEQ ID NO: 838 - protein, 18 aa, Artificial Sequence
  Synthetically generated peptide
  VARIANT (4)..(9): Xaa = Any Amino Acid
  misc_feature (11)..(11): Xaa can be any naturally occurring amino acid
  misc_feature (17)..(17): Xaa can be any naturally occurring amino acid
CCEXYCCNXPXACTGCXY

SEQ ID NO: 839 - protein, 17 aa, Artificial Sequence
  Synthetically generated peptide
  VARIANT (4)..(9): Xaa = Any Amino Acid
  misc_feature (12)..(12): Xaa can be any naturally occurring amino acid
CCEXYCCNXPAXCTGCY

SEQ ID NO: 840 - protein, 18 aa, Artificial Sequence
  Synthetically generated peptide
  VARIANT (4)..(9): Xaa = Any Amino Acid
  misc_feature (12)..(13): Xaa can be any naturally occurring amino acid
CCEXYCCNXPAXXCTGCY

SEQ ID NO: 841 - protein, 18 aa, Artificial Sequence
  Synthetically generated peptide
  VARIANT (4)..(9): Xaa = Any Amino Acid
  misc_feature (12)..(12): Xaa can be any naturally occurring amino acid
  misc_feature (14)..(14): Xaa can be any naturally occurring amino acid
CCEXYCCNXPAXCXTGCY

SEQ ID NO: 842 - protein, 18 aa, Artificial Sequence
  Synthetically generated peptide
  VARIANT (4)..(9): Xaa = Any Amino Acid
  misc_feature (12)..(12): Xaa can be any naturally occurring amino acid
  misc_feature (15)..(15): Xaa can be any naturally occurring amino acid
CCEXYCCNXPAXCTXGCY

SEQ ID NO: 843 - protein, 18 aa, Artificial Sequence
  Synthetically generated peptide
  VARIANT (4)..(9): Xaa = Any Amino Acid
  misc_feature (12)..(12): Xaa can be any naturally occurring amino acid
  misc_feature (16)..(16): Xaa can be any naturally occurring amino acid
CCEXYCCNXPAXCTGXCY

SEQ ID NO: 844 - protein, 18 aa, Artificial Sequence
  Synthetically generated peptide
  VARIANT (4)..(9): Xaa = Any Amino Acid
  misc_feature (12)..(12): Xaa can be any naturally occurring amino acid
  misc_feature (17)..(17): Xaa can be any naturally occurring amino acid
CCEXYCCNXPAXCTGCXY

SEQ ID NO: 845 - protein, 17 aa, Artificial Sequence
  Synthetically generated peptide
  VARIANT (4)..(9): Xaa = Any Amino Acid
  misc_feature (13)..(13): Xaa can be any naturally occurring amino acid
CCEXYCCNXPACXTGCY

SEQ ID NO: 846 - protein, 18 aa, Artificial Sequence
  Synthetically generated peptide
  VARIANT (4)..(9): Xaa = Any Amino Acid
  misc_feature (13)..(14): Xaa can be any naturally occurring amino acid
CCEXYCCNXPACXXTGCY

SEQ ID NO: 847 - protein, 18 aa, Artificial Sequence
  Synthetically generated peptide
  VARIANT (4)..(9): Xaa = Any Amino Acid
  misc_feature (13)..(13): Xaa can be any naturally occurring amino acid
  misc_feature (15)..(15): Xaa can be any naturally occurring amino acid
CCEXYCCNXPACXTXGCY

SEQ ID NO: 848 - protein, 18 aa, Artificial Sequence
  Synthetically generated peptide
  VARIANT (4)..(9): Xaa = Any Amino Acid
  misc_feature (13)..(13): Xaa can be any naturally occurring amino acid
  misc_feature (16)..(16): Xaa can be any naturally occurring amino acid
CCEXYCCNXPACXTGXCY

SEQ ID NO: 849 - protein, 18 aa, Artificial Sequence
  Synthetically generated peptide
  VARIANT (4)..(9): Xaa = Any Amino Acid
  misc_feature (13)..(13): Xaa can be any naturally occurring amino acid
  misc_feature (17)..(17): Xaa can be any naturally occurring amino acid
CCEXYCCNXPACXTGCXY

SEQ ID NO: 850 - protein, 17 aa, Artificial Sequence
  Synthetically generated peptide
  VARIANT (4)..(9): Xaa = Any Amino Acid
  misc_feature (14)..(14): Xaa can be any naturally occurring amino acid
CCEXYCCNXPACTXGCY

SEQ ID NO: 851 - protein, 18 aa, Artificial Sequence
  Synthetically generated peptide
  VARIANT (4)..(9): Xaa = Any Amino Acid
  misc_feature (14)..(15): Xaa can be any naturally occurring amino acid
CCEXYCCNXPACTXXGCY

SEQ ID NO: 852 - protein, 18 aa, Artificial Sequence
  Synthetically generated peptide
  VARIANT (4)..(9): Xaa = Any Amino Acid
  misc_feature (14)..(14): Xaa can be any naturally occurring amino acid
  misc_feature (16)..(16): Xaa can be any naturally occurring amino acid
CCEXYCCNXPACTXGXCY

SEQ ID NO: 853 - protein, 18 aa, Artificial Sequence
  Synthetically generated peptide
  VARIANT (4)..(9): Xaa = Any Amino Acid
  misc_feature (14)..(14): Xaa can be any naturally occurring amino acid
  misc_feature (17)..(17): Xaa can be any naturally occurring amino acid
CCEXYCCNXPACTXGCXY

SEQ ID NO: 854 - protein, 17 aa, Artificial Sequence
  Synthetically generated peptide
  VARIANT (4)..(9): Xaa = Any Amino Acid
  misc_feature (15)..(15): Xaa can be any naturally occurring amino acid
CCEXYCCNXPACTGXCY

SEQ ID NO: 855 - protein, 18 aa, Artificial Sequence
  Synthetically generated peptide
  VARIANT (4)..(9): Xaa = Any Amino Acid
  misc_feature (15)..(16): Xaa can be any naturally occurring amino acid
CCEXYCCNXPACTGXXCY

SEQ ID NO: 856 - protein, 18 aa, Artificial Sequence
  Synthetically generated peptide
  VARIANT (4)..(9): Xaa = Any Amino Acid
  misc_feature (15)..(15): Xaa can be any naturally occurring amino acid
  misc_feature (17)..(17): Xaa can be any naturally occurring amino acid
CCEXYCCNXPACTGXCXY

SEQ ID NO: 857 - protein, 17 aa, Artificial Sequence
  Synthetically generated peptide
  VARIANT (4)..(9): Xaa = Any Amino Acid
  misc_feature (16)..(16): Xaa can be any naturally occurring amino acid
CCEXYCCNXPACTGCXY

SEQ ID NO: 858 - protein, 18 aa, Artificial Sequence
  Synthetically generated peptide
  VARIANT (4)..(9): Xaa = Any Amino Acid
  misc_feature (16)..(17): Xaa can be any naturally occurring amino acid
CCEXYCCNXPACTGCXXY

SEQ ID NO: 859 - protein, 16 aa, Artificial Sequence
  Synthetically generated peptide
  VARIANT (1)..(16): Xaa = Any Amino Acid
  VARIANT (4)..(10): Xaa = Any Amino Acid
CCEXYCCNPXACTGCY

SEQ ID NO: 860 - protein, 17 aa, Artificial Sequence
  Synthetically generated peptide
  VARIANT (4)..(10): Xaa = Any Amino Acid
  misc_feature (11)..(11): Xaa can be any naturally occurring amino acid
CCEXYCCNPXXACTGCY

SEQ ID NO: 861 - protein, 18 aa, Artificial Sequence
  Synthetically generated peptide
  VARIANT (4)..(10): Xaa = Any Amino Acid
  misc_feature (11)..(12): Xaa can be any naturally occurring amino acid
CCEXYCCNPXXXACTGCY

SEQ ID NO: 862 - protein, 18 aa, Artificial Sequence
  Synthetically generated peptide
  VARIANT (4)..(10): Xaa = Any Amino Acid
  misc_feature (11)..(11): Xaa can be any naturally occurring amino acid
  misc_feature (13)..(13): Xaa can be any naturally occurring amino acid
CCEXYCCNPXXAXCTGCY

SEQ ID NO: 863 - protein, 18 aa, Artificial Sequence
  Synthetically generated peptide
  VARIANT (4)..(10): Xaa = Any Amino Acid
  misc_feature (11)..(11): Xaa can be any naturally occurring amino acid
  misc_feature (14)..(14): Xaa can be any naturally occurring amino acid
CCEXYCCNPXXACXTGCY

SEQ ID NO: 864 - protein, 18 aa, Artificial Sequence
  Synthetically generated peptide
  VARIANT (4)..(10): Xaa = Any Amino Acid
  misc_feature (11)..(11): Xaa can be any naturally occurring amino acid
  misc_feature (15)..(15): Xaa can be any naturally occurring amino acid
CCEXYCCNPXXACTXGCY

SEQ ID NO: 865 - protein, 18 aa, Artificial Sequence
  Synthetically generated peptide
  VARIANT (4)..(10): Xaa = Any Amino Acid
  misc_feature (11)..(11): Xaa can be any naturally occurring amino acid
  misc_feature (16)..(16): Xaa can be any naturally occurring amino acid
CCEXYCCNPXXACTGXCY

SEQ ID NO: 866 - protein, 18 aa, Artificial Sequence
  Synthetically generated peptide
  VARIANT (4)..(10): Xaa = Any Amino Acid
  misc_feature (11)..(11): Xaa can be any naturally occurring amino acid
  misc_feature (17)..(17): Xaa can be any naturally occurring amino acid
CCEXYCCNPXXACTGCXY

SEQ ID NO: 867 - protein, 17 aa, Artificial Sequence
  Synthetically generated peptide
  VARIANT (4)..(10): Xaa = Any Amino Acid
  misc_feature (12)..(12): Xaa can be any naturally occurring amino acid
CCEXYCCNPXAXCTGCY

SEQ ID NO: 868 - protein, 18 aa, Artificial Sequence
  Synthetically generated peptide
  VARIANT (4)..(10): Xaa = Any Amino Acid
  misc_feature (12)..(13): Xaa can be any naturally occurring amino acid
CCEXYCCNPXAXXCTGCY

SEQ ID NO: 869 - protein, 18 aa, Artificial Sequence
  Synthetically generated peptide
  VARIANT (4)..(10): Xaa = Any Amino Acid
  misc_feature (12)..(12): Xaa can be any naturally occurring amino acid
  misc_feature (14)..(14): Xaa can be any naturally occurring amino acid
CCEXYCCNPXAXCXTGCY

SEQ ID NO: 870 - protein, 18 aa, Artificial Sequence
  Synthetically generated peptide
  VARIANT (4)..(10): Xaa = Any Amino Acid
  misc_feature (12)..(12): Xaa can be any naturally occurring amino acid
  misc_feature (15)..(15): Xaa can be any naturally occurring amino acid
CCEXYCCNPXAXCTXGCY

SEQ ID NO: 871 - protein, 18 aa, Artificial Sequence
  Synthetically generated peptide
  VARIANT (4)..(10): Xaa = Any Amino Acid
  misc_feature (12)..(12): Xaa can be any naturally occurring amino acid
  misc_feature (16)..(16): Xaa can be any naturally occurring amino acid
CCEXYCCNPXAXCTGXCY

SEQ ID NO: 872 - protein, 18 aa, Artificial Sequence
  Synthetically generated peptide
  VARIANT (4)..(10): Xaa = Any Amino Acid
  misc_feature (12)..(12): Xaa can be any naturally occurring amino acid
  misc_feature (17)..(17): Xaa can be any naturally occurring amino acid
CCEXYCCNPXAXCTGCXY

SEQ ID NO: 873 - protein, 17 aa, Artificial Sequence
  Synthetically generated peptide
  VARIANT (4)..(10): Xaa = Any Amino Acid
  misc_feature (13)..(13): Xaa can be any naturally occurring amino acid
CCEXYCCNPXACXTGCY

SEQ ID NO: 874 - protein, 18 aa, Artificial Sequence
  Synthetically generated peptide
  VARIANT (4)..(10): Xaa = Any Amino Acid
  misc_feature (13)..(14): Xaa can be any naturally occurring amino acid
CCEXYCCNPXACXXTGCY

SEQ ID NO: 875 - protein, 18 aa, Artificial Sequence
  Synthetically generated peptide
  VARIANT (4)..(10): Xaa = Any Amino Acid
  misc_feature (13)..(13): Xaa can be any naturally occurring amino acid
  misc_feature (15)..(15): Xaa can be any naturally occurring amino acid
CCEXYCCNPXACXTXGCY

SEQ ID NO: 876 - protein, 18 aa, Artificial Sequence
  Synthetically generated peptide
  VARIANT (4)..(10): Xaa = Any Amino Acid
  misc_feature (13)..(13): Xaa can be any naturally occurring amino acid
  misc_feature (16)..(16): Xaa can be any naturally occurring amino acid
CCEXYCCNPXACXTGXCY

SEQ ID NO: 877 - protein, 18 aa, Artificial Sequence
  Synthetically generated peptide
  VARIANT (4)..(10): Xaa = Any Amino Acid
  misc_feature (13)..(13): Xaa can be any naturally occurring amino acid
  misc_feature (17)..(17): Xaa can be any naturally occurring amino acid
CCEXYCCNPXACXTGCXY

SEQ ID NO: 878 - protein, 17 aa, Artificial Sequence
  Synthetically generated peptide
  VARIANT (4)..(10): Xaa = Any Amino Acid
  misc_feature (14)..(14): Xaa can be any naturally occurring amino acid
CCEXYCCNPXACTXGCY

SEQ ID NO: 879 - protein, 18 aa, Artificial Sequence
  Synthetically generated peptide
  VARIANT (4)..(10): Xaa = Any Amino Acid
  misc_feature (14)..(15): Xaa can be any naturally occurring amino acid
CCEXYCCNPXACTXXGCY

SEQ ID NO: 880 - protein, 18 aa, Artificial Sequence
  Synthetically generated peptide
  VARIANT (4)..(10): Xaa = Any Amino Acid
  misc_feature (14)..(14): Xaa can be any naturally occurring amino acid
  misc_feature (16)..(16): Xaa can be any naturally occurring amino acid
CCEXYCCNPXACTXGXCY

SEQ ID NO: 881 - protein, 18 aa, Artificial Sequence
  Synthetically generated peptide
  VARIANT (4)..(10): Xaa = Any Amino Acid
  misc_feature (14)..(14): Xaa can be any naturally occurring amino acid
  misc_feature (17)..(17): Xaa can be any naturally occurring amino acid
CCEXYCCNPXACTXGCXY

SEQ ID NO: 882 - protein, 17 aa, Artificial Sequence
  Synthetically generated peptide
  VARIANT (4)..(10): Xaa = Any Amino Acid
  misc_feature (15)..(15): Xaa can be any naturally occurring amino acid
CCEXYCCNPXACTGXCY

SEQ ID NO: 883 - protein, 18 aa, Artificial Sequence
  Synthetically generated peptide
  VARIANT (4)..(10): Xaa = Any Amino Acid
  misc_feature (15)..(16): Xaa can be any naturally occurring amino acid
CCEXYCCNPXACTGXXCY

SEQ ID NO: 884 - protein, 18 aa, Artificial Sequence
  Synthetically generated peptide
  VARIANT (4)..(10): Xaa = Any Amino Acid
  misc_feature (15)..(15): Xaa can be any naturally occurring amino acid
  misc_feature (17)..(17): Xaa can be any naturally occurring amino acid
CCEXYCCNPXACTGXCXY

SEQ ID NO: 885 - protein, 17 aa, Artificial Sequence
  Synthetically generated peptide
  VARIANT (4)..(10): Xaa = Any Amino Acid
  misc_feature (16)..(16): Xaa can be any naturally occurring amino acid
CCEXYCCNPXACTGCXY

SEQ ID NO: 886 - protein, 18 aa, Artificial Sequence
  Synthetically generated peptide
  VARIANT (4)..(10): Xaa = Any Amino Acid
  misc_feature (16)..(17): Xaa can be any naturally occurring amino acid
CCEXYCCNPXACTGCXXY

SEQ ID NO: 887 - protein, 16 aa, Artificial Sequence
  Synthetically generated peptide
  VARIANT (1)..(16): Xaa = Any Amino Acid
  VARIANT (4)..(11): Xaa = Any Amino Acid
CCEXYCCNPAXCTGCY

SEQ ID NO: 888 - protein, 17 aa, Artificial Sequence
  Synthetically generated peptide
  VARIANT (4)..(11): Xaa = Any Amino Acid
  misc_feature (12)..(12): Xaa can be any naturally occurring amino acid
CCEXYCCNPAXXCTGCY

SEQ ID NO: 889 - protein, 18 aa, Artificial Sequence
  Synthetically generated peptide
  VARIANT (4)..(11): Xaa = Any Amino Acid
  misc_feature (12)..(13): Xaa can be any naturally occurring amino acid
CCEXYCCNPAXXXCTGCY

SEQ ID NO: 890 - protein, 18 aa, Artificial Sequence
  Synthetically generated peptide
  VARIANT (4)..(11): Xaa = Any Amino Acid
  misc_feature (12)..(12): Xaa can be any naturally occurring amino acid
  misc_feature (14)..(14): Xaa can be any naturally occurring amino acid
CCEXYCCNPAXXCXTGCY

SEQ ID NO: 891 - protein, 18 aa, Artificial Sequence
  Synthetically generated peptide
  VARIANT (4)..(11): Xaa = Any Amino Acid
  misc_feature (12)..(12): Xaa can be any naturally occurring amino acid
  misc_feature (15)..(15): Xaa can be any naturally occurring amino acid
CCEXYCCNPAXXCTXGCY

SEQ ID NO: 892 - protein, 18 aa, Artificial Sequence
  Synthetically generated peptide
  VARIANT (4)..(11): Xaa = Any Amino Acid
  misc_feature (12)..(12): Xaa can be any naturally occurring amino acid
  misc_feature (16)..(16): Xaa can be any naturally occurring amino acid
CCEXYCCNPAXXCTGXCY

SEQ ID NO: 893 - protein, 18 aa, Artificial Sequence
  Synthetically generated peptide
  VARIANT (4)..(11): Xaa = Any Amino Acid
  misc_feature (12)..(12): Xaa can be any naturally occurring amino acid
  misc_feature (17)..(17): Xaa can be any naturally occurring amino acid
CCEXYCCNPAXXCTGCXY

SEQ ID NO: 894 - protein, 17 aa, Artificial Sequence
  Synthetically generated peptide
  VARIANT (4)..(11): Xaa = Any Amino Acid
  misc_feature (13)..(13): Xaa can be any naturally occurring amino acid
CCEXYCCNPAXCXTGCY

SEQ ID NO: 895 - protein, 18 aa, Artificial Sequence
  Synthetically generated peptide
  VARIANT (4)..(11): Xaa = Any Amino Acid
  misc_feature (13)..(14): Xaa can be any naturally occurring amino acid
CCEXYCCNPAXCXXTGCY

SEQ ID NO: 896 - protein, 18 aa, Artificial Sequence
  Synthetically generated peptide
  VARIANT (4)..(11): Xaa = Any Amino Acid
  misc_feature (13)..(13): Xaa can be any naturally occurring amino acid
  misc_feature (15)..(15): Xaa can be any naturally occurring amino acid
CCEXYCCNPAXCXTXGCY

SEQ ID NO: 897 - protein, 18 aa, Artificial Sequence
  Synthetically generated peptide
  VARIANT (4)..(11): Xaa = Any Amino Acid
  misc_feature (13)..(13): Xaa can be any naturally occurring amino acid
  misc_feature (16)..(16): Xaa can be any naturally occurring amino acid
CCEXYCCNPAXCXTGXCY

SEQ ID NO: 898 - protein, 18 aa, Artificial Sequence
  Synthetically generated peptide
  VARIANT (4)..(11): Xaa = Any Amino Acid
  misc_feature (13)..(13): Xaa can be any naturally occurring amino acid
  misc_feature (17)..(17): Xaa can be any naturally occurring amino acid
CCEXYCCNPAXCXTGCXY

SEQ ID NO: 899 - protein, 17 aa, Artificial Sequence
  Synthetically generated peptide
  VARIANT (4)..(11): Xaa = Any Amino Acid
  misc_feature (14)..(14): Xaa can be any naturally occurring amino acid
CCEXYCCNPAXCTXGCY

SEQ ID NO: 900 - protein, 18 aa, Artificial Sequence
  Synthetically generated peptide
  VARIANT (4)..(11): Xaa = Any Amino Acid
  misc_feature (14)..(15): Xaa can be any naturally occurring amino acid
CCEXYCCNPAXCTXXGCY

SEQ ID NO: 901 - protein, 18 aa, Artificial Sequence
  Synthetically generated peptide
  VARIANT (4)..(11): Xaa = Any Amino Acid
  misc_feature (14)..(14): Xaa can be any naturally occurring amino acid
  misc_feature (16)..(16): Xaa can be any naturally occurring amino acid
CCEXYCCNPAXCTXGXCY

SEQ ID NO: 902 - protein, 18 aa, Artificial Sequence
  Synthetically generated peptide
  VARIANT (4)..(11): Xaa = Any Amino Acid
  misc_feature (14)..(14): Xaa can be any naturally occurring amino acid
  misc_feature (17)..(17): Xaa can be any naturally occurring amino acid
CCEXYCCNPAXCTXGCXY

SEQ ID NO: 903 - protein, 17 aa, Artificial Sequence
  Synthetically generated peptide
  VARIANT (4)..(11): Xaa = Any Amino Acid
  misc_feature (15)..(15): Xaa can be any naturally occurring amino acid
CCEXYCCNPAXCTGXCY

SEQ ID NO: 904 - protein, 18 aa, Artificial Sequence
  Synthetically generated peptide
  VARIANT (4)..(11): Xaa = Any Amino Acid
  misc_feature (15)..(16): Xaa can be any naturally occurring amino acid
CCEXYCCNPAXCTGXXCY

SEQ ID NO: 905 - protein, 18 aa, Artificial Sequence
  Synthetically generated peptide
  VARIANT (4)..(11): Xaa = Any Amino Acid
  misc_feature (15)..(15): Xaa can be any naturally occurring amino acid
  misc_feature (17)..(17): Xaa can be any naturally occurring amino acid
CCEXYCCNPAXCTGXCXY

SEQ ID NO: 906 - protein, 17 aa, Artificial Sequence
  Synthetically generated peptide
  VARIANT (4)..(11): Xaa = Any Amino Acid
  misc_feature (16)..(16): Xaa can be any naturally occurring amino acid
CCEXYCCNPAXCTGCXY

SEQ ID NO: 907 - protein, 18 aa, Artificial Sequence
  Synthetically generated peptide
  VARIANT (4)..(11): Xaa = Any Amino Acid
  misc_feature (16)..(17): Xaa can be any naturally occurring amino acid
CCEXYCCNPAXCTGCXXY

SEQ ID NO: 908 - protein, 16 aa, Artificial Sequence
  Synthetically generated peptide
  VARIANT (1)..(16): Xaa = Any Amino Acid
  VARIANT (4)..(12): Xaa = Any Amino Acid
CCEXYCCNPACXTGCY

SEQ ID NO: 909 - protein, 17 aa, Artificial Sequence
  Synthetically generated peptide
  VARIANT (4)..(12): Xaa = Any Amino Acid
  misc_feature (13)..(13): Xaa can be any naturally occurring amino acid
CCEXYCCNPACXXTGCY

SEQ ID NO: 910 - protein, 18 aa, Artificial Sequence
  Synthetically generated peptide
  VARIANT (4)..(12): Xaa = Any Amino Acid
  misc_feature (13)..(14): Xaa can be any naturally occurring amino acid
CCEXYCCNPACXXXTGCY

SEQ ID NO: 911 - protein, 18 aa, Artificial Sequence
  Synthetically generated peptide
  VARIANT (4)..(12): Xaa = Any Amino Acid
  misc_feature (13)..(13): Xaa can be any naturally occurring amino acid
  misc_feature (15)..(15): Xaa can be any naturally occurring amino acid
CCEXYCCNPACXXTXGCY

SEQ ID NO: 912 - protein, 18 aa, Artificial Sequence
  Synthetically generated peptide
  VARIANT (4)..(12): Xaa = Any Amino Acid
  misc_feature (13)..(13): Xaa can be any naturally occurring amino acid
  misc_feature (16)..(16): Xaa can be any naturally occurring amino acid
CCEXYCCNPACXXTGXCY

SEQ ID NO: 913 - protein, 18 aa, Artificial Sequence
  Synthetically generated peptide
  VARIANT (4)..(12): Xaa = Any Amino Acid
  misc_feature (13)..(13): Xaa can be any naturally occurring amino acid
  misc_feature (17)..(17): Xaa can be any naturally occurring amino acid
CCEXYCCNPACXXTGCXY

SEQ ID NO: 914 - protein, 17 aa, Artificial Sequence
  Synthetically generated peptide
  VARIANT (4)..(12): Xaa = Any Amino Acid
  misc_feature (14)..(14): Xaa can be any naturally occurring amino acid
CCEXYCCNPACXTXGCY

SEQ ID NO: 915 - protein, 18 aa, Artificial Sequence
  Synthetically generated peptide
  VARIANT (4)..(12): Xaa = Any Amino Acid
  misc_feature (14)..(15): Xaa can be any naturally occurring amino acid
CCEXYCCNPACXTXXGCY

SEQ ID NO: 916 - protein, 18 aa, Artificial Sequence
  Synthetically generated peptide
  VARIANT (4)..(12): Xaa = Any Amino Acid
  misc_feature (14)..(14): Xaa can be any naturally occurring amino acid
  misc_feature (16)..(16): Xaa can be any naturally occurring amino acid
CCEXYCCNPACXTXGXCY

SEQ ID NO: 917 - protein, 18 aa, Artificial Sequence
  Synthetically generated peptide
  VARIANT (4)..(12): Xaa = Any Amino Acid
  misc_feature (14)..(14): Xaa can be any naturally occurring amino acid
  misc_feature (17)..(17): Xaa can be any naturally occurring amino acid
CCEXYCCNPACXTXGCXY

SEQ ID NO: 918 - protein, 17 aa, Artificial Sequence
  Synthetically generated peptide
  VARIANT (4)..(12): Xaa = Any Amino Acid
  misc_feature (15)..(15): Xaa can be any naturally occurring amino acid
CCEXYCCNPACXTGXCY

SEQ ID NO: 919 - protein, 18 aa, Artificial Sequence
  Synthetically generated peptide
  VARIANT (4)..(12): Xaa = Any Amino Acid
  misc_feature (15)..(16): Xaa can be any naturally occurring amino acid
CCEXYCCNPACXTGXXCY

SEQ ID NO: 920 - protein, 18 aa, Artificial Sequence
  Synthetically generated peptide
  VARIANT (4)..(12): Xaa = Any Amino Acid
  misc_feature (15)..(15): Xaa can be any naturally occurring amino acid
  misc_feature (17)..(17): Xaa can be any naturally occurring amino acid
CCEXYCCNPACXTGXCXY

SEQ ID NO: 921 - protein, 17 aa, Artificial Sequence
  Synthetically generated peptide
  VARIANT (4)..(12): Xaa = Any Amino Acid
  misc_feature (16)..(16): Xaa can be any naturally occurring amino acid
CCEXYCCNPACXTGCXY

SEQ ID NO: 922 - protein, 18 aa, Artificial Sequence
  Synthetically generated peptide
  VARIANT (4)..(12): Xaa = Any Amino Acid
  misc_feature (16)..(17): Xaa can be any naturally occurring amino acid
CCEXYCCNPACXTGCXXY

SEQ ID NO: 923 - protein, 16 aa, Artificial Sequence
  Synthetically generated peptide
  VARIANT (4)..(13): Xaa = Any Amino Acid
CCEXYCCNPACTXGCY

SEQ ID NO: 924 - protein, 17 aa, Artificial Sequence
  Synthetically generated peptide
  VARIANT (4)..(13): Xaa = Any Amino Acid
  misc_feature (14)..(14): Xaa can be any naturally occurring amino acid
CCEXYCCNPACTXXGCY

SEQ ID NO: 925 - protein, 18 aa, Artificial Sequence
  Synthetically generated peptide
  VARIANT (4)..(13): Xaa = Any Amino Acid
  misc_feature (14)..(15): Xaa can be any naturally occurring amino acid
CCEXYCCNPACTXXXGCY

SEQ ID NO: 926 - protein, 18 aa, Artificial Sequence
  Synthetically generated peptide
  VARIANT (4)..(13): Xaa = Any Amino Acid
  misc_feature (14)..(14): Xaa can be any naturally occurring amino acid
  misc_feature (16)..(16): Xaa can be any naturally occurring amino acid
CCEXYCCNPACTXXGXCY

SEQ ID NO: 927 - protein, 18 aa, Artificial Sequence
  Synthetically generated peptide
  VARIANT (4)..(13): Xaa = Any Amino Acid
  misc_feature (14)..(14): Xaa can be any naturally occurring amino acid
  misc_feature (17)..(17): Xaa can be any naturally occurring amino acid
CCEXYCCNPACTXXGCXY

SEQ ID NO: 928 - protein, 17 aa, Artificial Sequence
  Synthetically generated peptide
  VARIANT (4)..(13): Xaa = Any Amino Acid
  misc_feature (15)..(15): Xaa can be any naturally occurring amino acid
CCEXYCCNPACTXGXCY

SEQ ID NO: 929 - protein, 18 aa, Artificial Sequence
  Synthetically generated peptide
  VARIANT (4)..(13): Xaa = Any Amino Acid
  misc_feature (15)..(16): Xaa can be any naturally occurring amino acid
CCEXYCCNPACTXGXXCY

SEQ ID NO: 930 - protein, 18 aa, Artificial Sequence
  Synthetically generated peptide
  VARIANT (4)..(13): Xaa = Any Amino Acid
  misc_feature (15)..(15): Xaa can be any naturally occurring amino acid
  misc_feature (17)..(17): Xaa can be any naturally occurring amino acid
CCEXYCCNPACTXGXCXY

SEQ ID NO: 931 - protein, 17 aa, Artificial Sequence
  Synthetically generated peptide
  VARIANT (4)..(13): Xaa = Any Amino Acid
  misc_feature (16)..(16): Xaa can be any naturally occurring amino acid
CCEXYCCNPACTXGCXY

SEQ ID NO: 932 - protein, 18 aa, Artificial Sequence
  Synthetically generated peptide
  VARIANT (4)..(13): Xaa = Any Amino Acid
  misc_feature (16)..(17): Xaa can be any naturally occurring amino acid
CCEXYCCNPACTXGCXXY

SEQ ID NO: 933 - protein, 16 aa, Artificial Sequence
  Synthetically generated peptide
  VARIANT (1)..(16): Xaa = Any Amino Acid
  VARIANT (4)..(14): Xaa = Any Amino Acid
CCEXYCCNPACTGXCY

SEQ ID NO: 934 - protein, 17 aa, Artificial Sequence
  Synthetically generated peptide
  VARIANT (4)..(14): Xaa = Any Amino Acid
  misc_feature (15)..(15): Xaa can be any naturally occurring amino acid
CCEXYCCNPACTGXXCY

SEQ ID NO: 935 - protein, 18 aa, Artificial Sequence
  Synthetically generated peptide
  VARIANT (4)..(14): Xaa = Any Amino Acid
  misc_feature (15)..(16): Xaa can be any naturally occurring amino acid
CCEXYCCNPACTGXXXCY

SEQ ID NO: 936 - protein, 18 aa, Artificial Sequence
  Synthetically generated peptide
  VARIANT (4)..(14): Xaa = Any Amino Acid
  misc_feature (15)..(15): Xaa can be any naturally occurring amino acid
  misc_feature (17)..(17): Xaa can be any naturally occurring amino acid
CCEXYCCNPACTGXXCXY

SEQ ID NO: 937 - protein, 17 aa, Artificial Sequence
  Synthetically generated peptide
  VARIANT (4)..(14): Xaa = Any Amino Acid
  misc_feature (16)..(16): Xaa can be any naturally occurring amino acid
CCEXYCCNPACTGXCXY

SEQ ID NO: 938 - protein, 18 aa, Artificial Sequence
  Synthetically generated peptide
  VARIANT (1)..(18): Xaa = Any Amino Acid
CCEXYCCNPACTGXCXXY

SEQ ID NO: 939 - protein, 16 aa, Artificial Sequence
  Synthetically generated peptide
  VARIANT (4)..(15): Xaa = Any Amino Acid
CCEXYCCNPACTGCXY

SEQ ID NO: 940 - protein, 17 aa, Artificial Sequence
  Synthetically generated peptide
  VARIANT (4)..(15): Xaa = Any Amino Acid
  misc_feature (16)..(16): Xaa can be any naturally occurring amino acid
CCEXYCCNPACTGCXXY

SEQ ID NO: 941 - protein, 18 aa, Artificial Sequence
  Synthetically generated peptide
  VARIANT (4)..(15): Xaa = Any Amino Acid
  misc_feature (16)..(17): Xaa can be any naturally occurring amino acid
CCEXYCCNPACTGCXXXY

SEQ ID NO: 942 - protein, 15 aa, Artificial Sequence
  Synthetically generated peptide
  VARIANT (1)..(15): Xaa = Any Amino Acid
  VARIANT (5)..(5): Xaa = Any Amino Acid
CCEYXCCNPACTGCY

SEQ ID NO: 943 - protein, 16 aa, Artificial Sequence
  Synthetically generated peptide
  VARIANT (1)..(16): Xaa = Any Amino Acid
  VARIANT (5)..(6): Xaa = Any Amino Acid
CCEYXXCCNPACTGCY

SEQ ID NO: 944 - protein, 17 aa, Artificial Sequence
  Synthetically generated peptide
  VARIANT (5)..(6): Xaa = Any Amino Acid
  misc_feature (7)..(7): Xaa can be any naturally occurring amino acid
CCEYXXXCCNPACTGCY

SEQ ID NO: 945 - protein, 18 aa, Artificial Sequence
  Synthetically generated peptide
  VARIANT (5)..(6): Xaa = Any Amino Acid
  misc_feature (7)..(8): Xaa can be any naturally occurring amino acid
CCEYXXXXCCNPACTGCY

SEQ ID NO: 946 - protein, 18 aa, Artificial Sequence
  Synthetically generated peptide
  VARIANT (5)..(6): Xaa = Any Amino Acid
  misc_feature (7)..(7): Xaa can be any naturally occurring amino acid
  misc_feature (10)..(10): Xaa can be any naturally occurring amino acid
CCEYXXXCCXNPACTGCY

SEQ ID NO: 947 - protein, 18 aa, Artificial Sequence
  Synthetically generated peptide
  VARIANT (5)..(6): Xaa = Any Amino Acid
  misc_feature (7)..(7): Xaa can be any naturally occurring amino acid
  misc_feature (11)..(11): Xaa can be any naturally occurring amino acid
CCEYXXXCCNXPACTGCY

SEQ ID NO: 948 - protein, 18 aa, Artificial Sequence
  Synthetically generated peptide
  VARIANT (5)..(6): Xaa = Any Amino Acid
  misc_feature (7)..(7): Xaa can be any naturally occurring amino acid
  misc_feature (12)..(12): Xaa can be any naturally occurring amino acid
CCEYXXXCCNPXACTGCY

SEQ ID NO: 949 - protein, 18 aa, Artificial Sequence
  Synthetically generated peptide
  VARIANT (5)..(6): Xaa = Any Amino Acid
  misc_feature (7)..(7): Xaa can be any naturally occurring amino acid
  misc_feature (13)..(13): Xaa can be any naturally occurring amino acid
CCEYXXXCCNPAXCTGCY

SEQ ID NO: 950 - protein, 18 aa, Artificial Sequence
  Synthetically generated peptide
  VARIANT (5)..(6): Xaa = Any Amino Acid
  misc_feature (7)..(7): Xaa can be any naturally occurring amino acid
  misc_feature (14)..(14): Xaa can be any naturally occurring amino acid
CCEYXXXCCNPACXTGCY

SEQ ID NO: 951 - protein, 18 aa, Artificial Sequence
  Synthetically generated peptide
  VARIANT (5)..(6): Xaa = Any Amino Acid
  misc_feature (7)..(7): Xaa can be any naturally occurring amino acid
  misc_feature (15)..(15): Xaa can be any naturally occurring amino acid
CCEYXXXCCNPACTXGCY

SEQ ID NO: 952 - protein, 18 aa, Artificial Sequence
  Synthetically generated peptide
  VARIANT (5)..(6): Xaa = Any Amino Acid
  misc_feature (7)..(7): Xaa can be any naturally occurring amino acid
  misc_feature (16)..(16): Xaa can be any naturally occurring amino acid
CCEYXXXCCNPACTGXCY

SEQ ID NO: 953 - protein, 18 aa, Artificial Sequence
  Synthetically generated peptide
  VARIANT (5)..(6): Xaa = Any Amino Acid
  misc_feature (7)..(7): Xaa can be any naturally occurring amino acid
  misc_feature (17)..(17): Xaa can be any naturally occurring amino acid
CCEYXXXCCNPACTGCXY

SEQ ID NO: 954 - protein, 17 aa, Artificial Sequence
  Synthetically generated peptide
  VARIANT (5)..(6): Xaa = Any Amino Acid
  misc_feature (9)..(9): Xaa can be any naturally occurring amino acid
CCEYXXCCXNPACTGCY

SEQ ID NO: 955 - protein, 18 aa, Artificial Sequence
  Synthetically generated peptide
  VARIANT (5)..(6): Xaa = Any Amino Acid
  misc_feature (9)..(10): Xaa can be any naturally occurring amino acid
CCEYXXCCXXNPACTGCY

SEQ ID NO: 956 - protein, 18 aa, Artificial Sequence
  Synthetically generated peptide
  VARIANT (5)..(6): Xaa = Any Amino Acid
  misc_feature (9)..(9): Xaa can be any naturally occurring amino acid
  misc_feature (11)..(11): Xaa can be any naturally occurring amino acid
CCEYXXCCXNXPACTGCY

SEQ ID NO: 957 - protein, 18 aa, Artificial Sequence
  Synthetically generated peptide
  VARIANT (5)..(6): Xaa = Any Amino Acid
  misc_feature (9)..(9): Xaa can be any naturally occurring amino acid
  misc_feature (12)..(12): Xaa can be any naturally occurring amino acid
CCEYXXCCXNPXACTGCY

SEQ ID NO: 958 - protein, 18 aa, Artificial Sequence
  Synthetically generated peptide
  VARIANT (5)..(6): Xaa = Any Amino Acid
  misc_feature (9)..(9): Xaa can be any naturally occurring amino acid
  misc_feature (13)..(13): Xaa can be any naturally occurring amino acid
CCEYXXCCXNPAXCTGCY

SEQ ID NO: 959 - protein, 18 aa, Artificial Sequence
  Synthetically generated peptide
  VARIANT (5)..(6): Xaa = Any Amino Acid
  misc_feature (9)..(9): Xaa can be any naturally occurring amino acid
  misc_feature (14)..(14): Xaa can be any naturally occurring amino acid
CCEYXXCCXNPACXTGCY

SEQ ID NO: 960 - protein, 18 aa, Artificial Sequence
  Synthetically generated peptide
  VARIANT (5)..(6): Xaa = Any Amino Acid
  misc_feature (9)..(9): Xaa can be any naturally occurring amino acid
  misc_feature (15)..(15): Xaa can be any naturally occurring amino acid
CCEYXXCCXNPACTXGCY

SEQ ID NO: 961 - protein, 18 aa, Artificial Sequence
  Synthetically generated peptide
  VARIANT (5)..(6): Xaa = Any Amino Acid
  misc_feature (9)..(9): Xaa can be any naturally occurring amino acid
  misc_feature (16)..(16): Xaa can be any naturally occurring amino acid
CCEYXXCCXNPACTGXCY

SEQ ID NO: 962 - protein, 18 aa, Artificial Sequence
  Synthetically generated peptide
  VARIANT (5)..(6): Xaa = Any Amino Acid
  misc_feature (9)..(9): Xaa can be any naturally occurring amino acid
  misc_feature (17)..(17): Xaa can be any naturally occurring amino acid
CCEYXXCCXNPACTGCXY

SEQ ID NO: 963 - protein, 17 aa, Artificial Sequence
  Synthetically generated peptide
  VARIANT (5)..(6): Xaa = Any Amino Acid
  misc_feature (10)..(10): Xaa can be any naturally occurring amino acid
CCEYXXCCNXPACTGCY

SEQ ID NO: 964 - protein, 18 aa, Artificial Sequence
  Synthetically generated peptide
  VARIANT (5)..(6): Xaa = Any Amino Acid
  misc_feature (10)..(11): Xaa can be any naturally occurring amino acid
CCEYXXCCNXXPACTGCY

SEQ ID NO: 965 - protein, 18 aa, Artificial Sequence
  Synthetically generated peptide
  VARIANT (5)..(6): Xaa = Any Amino Acid
  misc_feature (10)..(10): Xaa can be any naturally occurring amino acid
  misc_feature (12)..(12): Xaa can be any naturally occurring amino acid
CCEYXXCCNXPXACTGCY

SEQ ID NO: 966 - protein, 18 aa, Artificial Sequence
  Synthetically generated peptide
  VARIANT (5)..(6): Xaa = Any Amino Acid
  misc_feature (10)..(10): Xaa can be any naturally occurring amino acid
  misc_feature (13)..(13): Xaa can be any naturally occurring amino acid
CCEYXXCCNXPAXCTGCY

SEQ ID NO: 967 - protein, 18 aa, Artificial Sequence
  Synthetically generated peptide
  VARIANT (5)..(6): Xaa = Any Amino Acid
  misc_feature (10)..(10): Xaa can be any naturally occurring amino acid
  misc_feature (14)..(14): Xaa can be any naturally occurring amino acid
CCEYXXCCNXPACXTGCY

SEQ ID NO: 968 - protein, 18 aa, Artificial Sequence
  Synthetically generated peptide
  VARIANT (5)..(6): Xaa = Any Amino Acid
  misc_feature (10)..(10): Xaa can be any naturally occurring amino acid
  misc_feature (15)..(15): Xaa can be any naturally occurring amino acid
CCEYXXCCNXPACTXGCY

SEQ ID NO: 969 - protein, 18 aa, Artificial Sequence
  Synthetically generated peptide
  VARIANT (5)..(6): Xaa = Any Amino Acid
  misc_feature (10)..(10): Xaa can be any naturally occurring amino acid
  misc_feature (16)..(16): Xaa can be any naturally occurring amino acid
CCEYXXCCNXPACTGXCY

SEQ ID NO: 970 - protein, 18 aa, Artificial Sequence
  Synthetically generated peptide
  VARIANT (5)..(6): Xaa = Any Amino Acid
  misc_feature (10)..(10): Xaa can be any naturally occurring amino acid
  misc_feature (17)..(17): Xaa can be any naturally occurring amino acid
CCEYXXCCNXPACTGCXY

SEQ ID NO: 971 - protein, 17 aa, Artificial Sequence
  Synthetically generated peptide
  VARIANT (5)..(6): Xaa = Any Amino Acid
  misc_feature (11)..(11): Xaa can be any naturally occurring amino acid
CCEYXXCCNPXACTGCY

SEQ ID NO: 972 - protein, 18 aa, Artificial Sequence
  Synthetically generated peptide
  VARIANT (5)..(6): Xaa = Any Amino Acid
  misc_feature (11)..(12): Xaa can be any naturally occurring amino acid
CCEYXXCCNPXXACTGCY

SEQ ID NO: 973 - protein, 18 aa, Artificial Sequence
  Synthetically generated peptide
  VARIANT (1)..(18): Xaa = Any Amino Acid
CCEYXXCCNPXAXCTGCY

SEQ ID NO: 974 - protein, 18 aa, Artificial Sequence
  Synthetically generated peptide
  VARIANT (5)..(6): Xaa = Any Amino Acid
  misc_feature (11)..(11): Xaa can be any naturally occurring amino acid
  misc_feature (14)..(14): Xaa can be any naturally occurring amino acid
CCEYXXCCNPXACXTGCY

SEQ ID NO: 975 - protein, 18 aa, Artificial Sequence
  Synthetically generated peptide
  VARIANT (5)..(6): Xaa = Any Amino Acid
  misc_feature (11)..(11): Xaa can be any naturally occurring amino acid
  misc_feature (15)..(15): Xaa can be any naturally occurring amino acid
CCEYXXCCNPXACTXGCY

SEQ ID NO: 976 - protein, 18 aa, Artificial Sequence
  Synthetically generated peptide
  VARIANT (5)..(6): Xaa = Any Amino Acid
  misc_feature (11)..(11): Xaa can be any naturally occurring amino acid
  misc_feature (16)..(16): Xaa can be any naturally occurring amino acid
CCEYXXCCNPXACTGXCY

SEQ ID NO: 977 - protein, 18 aa, Artificial Sequence
  Synthetically generated peptide
  VARIANT (5)..(6): Xaa = Any Amino Acid
  misc_feature (11)..(11): Xaa can be any naturally occurring amino acid
  misc_feature (17)..(17): Xaa can be any naturally occurring amino acid
CCEYXXCCNPXACTGCXY

SEQ ID NO: 978 - protein, 17 aa, Artificial Sequence
  Synthetically generated peptide
  VARIANT (5)..(6): Xaa = Any Amino Acid
  misc_feature (12)..(12): Xaa can be any naturally occurring amino acid
CCEYXXCCNPAXCTGCY

SEQ ID NO: 979 - protein, 18 aa, Artificial Sequence
  Synthetically generated peptide
  VARIANT (5)..(6): Xaa = Any Amino Acid
  misc_feature (12)..(13): Xaa can be any naturally occurring amino acid
CCEYXXCCNPAXXCTGCY

SEQ ID NO: 980 - protein, 18 aa, Artificial Sequence
  Synthetically generated peptide
  VARIANT (5)..(6): Xaa = Any Amino Acid
  misc_feature (12)..(12): Xaa can be any naturally occurring amino acid
  misc_feature (14)..(14): Xaa can be any naturally occurring amino acid
CCEYXXCCNPAXCXTGCY

SEQ ID NO: 981 - protein, 18 aa, Artificial Sequence
  Synthetically generated peptide
  VARIANT (1)..(18): Xaa = Any Amino Acid
CCEYXXCCNPAXCTXGCY

SEQ ID NO: 982 - protein, 18 aa, Artificial Sequence
  Synthetically generated peptide
  VARIANT (1)..(18): Xaa = Any Amino Acid
CCEYXXCCNPAXCTGXCY

SEQ ID NO: 983 - protein, 18 aa, Artificial Sequence
  Synthetically generated peptide
  VARIANT (1)..(18): Xaa = Any Amino Acid
CCEYXXCCNPAXCTGCXY

SEQ ID NO: 984 - protein, 17 aa, Artificial Sequence
  Synthetically generated peptide
  VARIANT (5)..(6): Xaa = Any Amino Acid
  misc_feature (13)..(13): Xaa can be any naturally occurring amino acid
CCEYXXCCNPACXTGCY

SEQ ID NO: 985 - protein, 18 aa, Artificial Sequence
  Synthetically generated peptide
  VARIANT (5)..(6): Xaa = Any Amino Acid
  misc_feature (13)..(14): Xaa can be any naturally occurring amino acid
CCEYXXCCNPACXXTGCY

SEQ ID NO: 986 - protein, 18 aa, Artificial Sequence
  Synthetically generated peptide
  VARIANT (5)..(6): Xaa = Any Amino Acid
  misc_feature (13)..(13): Xaa can be any naturally occurring amino acid
  misc_feature (15)..(15): Xaa can be any naturally occurring amino acid
CCEYXXCCNPACXTXGCY

SEQ ID NO: 987 - protein, 18 aa, Artificial Sequence
  Synthetically generated peptide
  VARIANT (5)..(6): Xaa = Any Amino Acid
  misc_feature (13)..(13): Xaa can be any naturally occurring amino acid
  misc_feature (16)..(16): Xaa can be any naturally occurring amino acid
CCEYXXCCNPACXTGXCY

SEQ ID NO: 988 - protein, 18 aa, Artificial Sequence
  Synthetically generated peptide
  VARIANT (5)..(6): Xaa = Any Amino Acid
  misc_feature (13)..(13): Xaa can be any naturally occurring amino acid
  misc_feature (17)..(17): Xaa can be any naturally occurring amino acid
CCEYXXCCNPACXTGCXY

SEQ ID NO: 989 - protein, 17 aa, Artificial Sequence
  Synthetically generated peptide
  VARIANT (5)..(6): Xaa = Any Amino Acid
  misc_feature (14)..(14): Xaa can be any naturally occurring amino acid
CCEYXXCCNPACTXGCY

SEQ ID NO: 990 - protein, 18 aa, Artificial Sequence
  Synthetically generated peptide
  VARIANT (5)..(6): Xaa = Any Amino Acid
  misc_feature (14)..(15): Xaa can be any naturally occurring amino acid
CCEYXXCCNPACTXXGCY

SEQ ID NO: 991 - protein, 18 aa, Artificial Sequence
  Synthetically generated peptide
  VARIANT (1)..(18): Xaa = Any Amino Acid
CCEYXXCCNPACTXGXCY

SEQ ID NO: 992 - protein, 18 aa, Artificial Sequence
  Synthetically generated peptide
  VARIANT (5)..(6): Xaa = Any Amino Acid
  misc_feature (14)..(14): Xaa can be any naturally occurring amino acid
  misc_feature (17)..(17): Xaa can be any naturally occurring amino acid
CCEYXXCCNPACTXGCXY

SEQ ID NO: 993 - protein, 17 aa, Artificial Sequence
  Synthetically generated peptide
  VARIANT (5)..(6): Xaa = Any Amino Acid
  misc_feature (15)..(15): Xaa can be any naturally occurring amino acid
CCEYXXCCNPACTGXCY

SEQ ID NO: 994 - protein, 18 aa, Artificial Sequence
  Synthetically generated peptide
  VARIANT (5)..(6): Xaa = Any Amino Acid
  misc_feature (15)..(16): Xaa can be any naturally occurring amino acid
CCEYXXCCNPACTGXXCY

SEQ ID NO: 995 - protein, 18 aa, Artificial Sequence
  Synthetically generated peptide
  VARIANT (5)..(6): Xaa = Any Amino Acid
  misc_feature (15)..(15): Xaa can be any naturally occurring amino acid
  misc_feature (17)..(17): Xaa can be any naturally occurring amino acid
CCEYXXCCNPACTGXCXY

SEQ ID NO: 996 - protein, 17 aa, Artificial Sequence
  Synthetically generated peptide
  VARIANT (5)..(6): Xaa = Any Amino Acid
  misc_feature (16)..(16): Xaa can be any naturally occurring amino acid
CCEYXXCCNPACTGCXY

SEQ ID NO: 997 - protein, 18 aa, Artificial Sequence
  Synthetically generated peptide
  VARIANT (5)..(6): Xaa = Any Amino Acid
  misc_feature (16)..(17): Xaa can be any naturally occurring amino acid
CCEYXXCCNPACTGCXXY

SEQ ID NO: 998 - protein, 16 aa, Artificial Sequence
  Synthetically generated peptide
  VARIANT (5)..(8): Xaa = Any Amino Acid
CCEYXCCXNPACTGCY

SEQ ID NO: 999 - protein, 17 aa, Artificial Sequence
  Synthetically generated peptide
  VARIANT (5)..(8): Xaa = Any Amino Acid
  misc_feature (9)..(9): Xaa can be any naturally occurring amino acid
CCEYXCCXXNPACTGCY

SEQ ID NO: 1000 - protein, 18 aa, Artificial Sequence
  Synthetically generated peptide
  VARIANT (5)..(8): Xaa = Any Amino Acid
  misc_feature (9)..(10): Xaa can be any naturally occurring amino acid
CCEYXCCXXXNPACTGCY

SEQ ID NO: 1001 - protein, 18 aa, Artificial Sequence
  Synthetically generated peptide
  VARIANT (5)..(8): Xaa = Any Amino Acid
  misc_feature (9)..(9): Xaa can be any naturally occurring amino acid
  misc_feature (11)..(11): Xaa can be any naturally occurring amino acid
CCEYXCCXXNXPACTGCY

SEQ ID NO: 1002 - protein, 18 aa, Artificial Sequence
  Synthetically generated peptide
  VARIANT (5)..(8): Xaa = Any Amino Acid
  misc_feature (9)..(9): Xaa can be any naturally occurring amino acid
  misc_feature (12)..(12): Xaa can be any naturally occurring amino acid
CCEYXCCXXNPXACTGCY

SEQ ID NO: 1003 - protein, 18 aa, Artificial Sequence
  Synthetically generated peptide
  VARIANT (5)..(8): Xaa = Any Amino Acid
  misc_feature (9)..(9): Xaa can be any naturally occurring amino acid
  misc_feature (13)..(13): Xaa can be any naturally occurring amino acid
CCEYXCCXXNPAXCTGCY

SEQ ID NO: 1004 - protein, 18 aa, Artificial Sequence
  Synthetically generated peptide
  VARIANT (5)..(8): Xaa = Any Amino Acid
  misc_feature (9)..(9): Xaa can be any naturally occurring amino acid
  misc_feature (14)..(14): Xaa can be any naturally occurring amino acid
CCEYXCCXXNPACXTGCY

SEQ ID NO: 1005 - protein, 18 aa, Artificial Sequence
  Synthetically generated peptide
  VARIANT (5)..(8): Xaa = Any Amino Acid
  misc_feature (9)..(9): Xaa can be any naturally occurring amino acid
  misc_feature (15)..(15): Xaa can be any naturally occurring amino acid
CCEYXCCXXNPACTXGCY

SEQ ID NO: 1006 - protein, 18 aa, Artificial Sequence
  Synthetically generated peptide
  VARIANT (5)..(8): Xaa = Any Amino Acid
  misc_feature (9)..(9): Xaa can be any naturally occurring amino acid
  misc_feature (16)..(16): Xaa can be any naturally occurring amino acid
CCEYXCCXXNPACTGXCY

SEQ ID NO: 1007 - protein, 18 aa, Artificial Sequence
  Synthetically generated peptide
  VARIANT (5)..(8): Xaa = Any Amino Acid
  misc_feature (9)..(9): Xaa can be any naturally occurring amino acid
  misc_feature (17)..(17): Xaa can be any naturally occurring amino acid
CCEYXCCXXNPACTGCXY

SEQ ID NO: 1008 - protein, 17 aa, Artificial Sequence
  Synthetically generated peptide
  VARIANT (5)..(8): Xaa = Any Amino Acid
  misc_feature (10)..(10): Xaa can be any naturally occurring amino acid
CCEYXCCXNXPACTGCY

SEQ ID NO: 1009 - protein, 18 aa, Artificial Sequence
  Synthetically generated peptide
  VARIANT (5)..(8): Xaa = Any Amino Acid
  misc_feature (10)..(11): Xaa can be any naturally occurring amino acid
CCEYXCCXNXXPACTGCY

SEQ ID NO: 1010 - protein, 18 aa, Artificial Sequence
  Synthetically generated peptide
  VARIANT (5)..(8): Xaa = Any Amino Acid
  misc_feature (10)..(10): Xaa can be any naturally occurring amino acid
  misc_feature (12)..(12): Xaa can be any naturally occurring amino acid
CCEYXCCXNXPXACTGCY

SEQ ID NO: 1011 - protein, 18 aa, Artificial Sequence
  Synthetically generated peptide
  VARIANT (5)..(8): Xaa = Any Amino Acid
  misc_feature (10)..(10): Xaa can be any naturally occurring amino acid
  misc_feature (13)..(13): Xaa can be any naturally occurring amino acid
CCEYXCCXNXPAXCTGCY

SEQ ID NO: 1012 - protein, 18 aa, Artificial Sequence
  Synthetically generated peptide
  VARIANT (5)..(8): Xaa = Any Amino Acid
  misc_feature (10)..(10): Xaa can be any naturally occurring amino acid
  misc_feature (14)..(14): Xaa can be any naturally occurring amino acid
CCEYXCCXNXPACXTGCY

SEQ ID NO: 1013 - protein, 18 aa, Artificial Sequence
  Synthetically generated peptide
  VARIANT (5)..(8): Xaa = Any Amino Acid
  misc_feature (10)..(10): Xaa can be any naturally occurring amino acid
  misc_feature (15)..(15): Xaa can be any naturally occurring amino acid
CCEYXCCXNXPACTXGCY

SEQ ID NO: 1014 - protein, 18 aa, Artificial Sequence
  Synthetically generated peptide
  VARIANT (5)..(8): Xaa = Any Amino Acid
  misc_feature (10)..(10): Xaa can be any naturally occurring amino acid
  misc_feature (16)..(16): Xaa can be any naturally occurring amino acid
CCEYXCCXNXPACTGXCY

SEQ ID NO: 1015 - protein, 18 aa, Artificial Sequence
  Synthetically generated peptide
  VARIANT (5)..(8): Xaa = Any Amino Acid
  misc_feature (10)..(10): Xaa can be any naturally occurring amino acid
  misc_feature (17)..(17): Xaa can be any naturally occurring amino acid
CCEYXCCXNXPACTGCXY

SEQ ID NO: 1016 - protein, 17 aa, Artificial Sequence
  Synthetically generated peptide
  VARIANT (5)..(8): Xaa = Any Amino Acid
  misc_feature (11)..(11): Xaa can be any naturally occurring amino acid
CCEYXCCXNPXACTGCY

SEQ ID NO: 1017 - protein, 18 aa, Artificial Sequence
  Synthetically generated peptide
  VARIANT (5)..(8): Xaa = Any Amino Acid
  misc_feature (11)..(12): Xaa can be any naturally occurring amino acid
CCEYXCCXNPXXACTGCY

SEQ ID NO: 1018 - protein, 18 aa, Artificial Sequence
  Synthetically generated peptide
  VARIANT (5)..(8): Xaa = Any Amino Acid
  misc_feature (11)..(11): Xaa can be any naturally occurring amino acid
  misc_feature (13)..(13): Xaa can be any naturally occurring amino acid
CCEYXCCXNPXAXCTGCY

SEQ ID NO: 1019 - protein, 18 aa, Artificial Sequence
  Synthetically generated peptide
  VARIANT (5)..(8): Xaa = Any Amino Acid
  misc_feature (11)..(11): Xaa can be any naturally occurring amino acid
  misc_feature (14)..(14): Xaa can be any naturally occurring amino acid
CCEYXCCXNPXACXTGCY

SEQ ID NO: 1020 - protein, 18 aa, Artificial Sequence
  Synthetically generated peptide
  VARIANT (5)..(8): Xaa = Any Amino Acid
  misc_feature (11)..(11): Xaa can be any naturally occurring amino acid
  misc_feature (15)..(15): Xaa can be any naturally occurring amino acid
CCEYXCCXNPXACTXGCY

SEQ ID NO: 1021 - protein, 18 aa, Artificial Sequence
  Synthetically generated peptide
  VARIANT (5)..(8): Xaa = Any Amino Acid
  misc_feature (11)..(11): Xaa can be any naturally occurring amino acid
  misc_feature (16)..(16): Xaa can be any naturally occurring amino acid
CCEYXCCXNPXACTGXCY

SEQ ID NO: 1022 - protein, 18 aa, Artificial Sequence
  Synthetically generated peptide
  VARIANT (5)..(8): Xaa = Any Amino Acid
  misc_feature (11)..(11): Xaa can be any naturally occurring amino acid
  misc_feature (17)..(17): Xaa can be any naturally occurring amino acid
CCEYXCCXNPXACTGCXY

SEQ ID NO: 1023 - protein, 17 aa, Artificial Sequence
  Synthetically generated peptide
  VARIANT (5)..(8): Xaa = Any Amino Acid
  misc_feature (12)..(12): Xaa can be any naturally occurring amino acid
CCEYXCCXNPAXCTGCY

SEQ ID NO: 1024 - protein, 18 aa, Artificial Sequence
  Synthetically generated peptide
  VARIANT (5)..(8): Xaa = Any Amino Acid
  misc_feature (12)..(13): Xaa can be any naturally occurring amino acid
CCEYXCCXNPAXXCTGCY

SEQ ID NO: 1025 - protein, 18 aa, Artificial Sequence
  Synthetically generated peptide
  VARIANT (5)..(8): Xaa = Any Amino Acid
  misc_feature (12)..(12): Xaa can be any naturally occurring amino acid
  misc_feature (14)..(14): Xaa can be any naturally occurring amino acid
CCEYXCCXNPAXCXTGCY

SEQ ID NO: 1026 - protein, 18 aa, Artificial Sequence
  Synthetically generated peptide
  VARIANT (5)..(8): Xaa = Any Amino Acid
  misc_feature (12)..(12): Xaa can be any naturally occurring amino acid
  misc_feature (15)..(15): Xaa can be any naturally occurring amino acid
CCEYXCCXNPAXCTXGCY

SEQ ID NO: 1027 - protein, 18 aa, Artificial Sequence
  Synthetically generated peptide
  VARIANT (5)..(8): Xaa = Any Amino Acid
  misc_feature (12)..(12): Xaa can be any naturally occurring amino acid
  misc_feature (16)..(16): Xaa can be any naturally occurring amino acid
CCEYXCCXNPAXCTGXCY

SEQ ID NO: 1028 - protein, 18 aa, Artificial Sequence
  Synthetically generated peptide
  VARIANT (5)..(8): Xaa = Any Amino Acid
  misc_feature (12)..(12): Xaa can be any naturally occurring amino acid
  misc_feature (17)..(17): Xaa can be any naturally occurring amino acid
CCEYXCCXNPAXCTGCXY

SEQ ID NO: 1029 - protein, 17 aa, Artificial Sequence
  Synthetically generated peptide
  VARIANT (5)..(8): Xaa = Any Amino Acid
  misc_feature (13)..(13): Xaa can be any naturally occurring amino acid
CCEYXCCXNPACXTGCY

SEQ ID NO: 1030 - protein, 18 aa, Artificial Sequence
  Synthetically generated peptide
  VARIANT (5)..(8): Xaa = Any Amino Acid
  misc_feature (13)..(14): Xaa can be any naturally occurring amino acid
CCEYXCCXNPACXXTGCY

SEQ ID NO: 1031 - protein, 18 aa, Artificial Sequence
  Synthetically generated peptide
  VARIANT (5)..(8): Xaa = Any Amino Acid
  misc_feature (13)..(13): Xaa can be any naturally occurring amino acid
  misc_feature (15)..(15): Xaa can be any naturally occurring amino acid
CCEYXCCXNPACXTXGCY

SEQ ID NO: 1032 - protein, 18 aa, Artificial Sequence
  Synthetically generated peptide
  VARIANT (5)..(8): Xaa = Any Amino Acid
  misc_feature (13)..(13): Xaa can be any naturally occurring amino acid
  misc_feature (16)..(16): Xaa can be any naturally occurring amino acid
CCEYXCCXNPACXTGXCY

SEQ ID NO: 1033 - protein, 18 aa, Artificial Sequence
  Synthetically generated peptide
  VARIANT (5)..(8): Xaa = Any Amino Acid
  misc_feature (13)..(13): Xaa can be any naturally occurring amino acid
  misc_feature (17)..(17): Xaa can be any naturally occurring amino acid
CCEYXCCXNPACXTGCXY

SEQ ID NO: 1034 - protein, 17 aa, Artificial Sequence
  Synthetically generated peptide
  VARIANT (5)..(8): Xaa = Any Amino Acid
  misc_feature (14)..(14): Xaa can be any naturally occurring amino acid
CCEYXCCXNPACTXGCY

SEQ ID NO: 1035 - protein, 18 aa, Artificial Sequence
  Synthetically generated peptide
  VARIANT (5)..(8): Xaa = Any Amino Acid
  misc_feature (14)..(15): Xaa can be any naturally occurring amino acid
CCEYXCCXNPACTXXGCY

SEQ ID NO: 1036 - protein, 18 aa, Artificial Sequence
  Synthetically generated peptide
  VARIANT (5)..(8): Xaa = Any Amino Acid
  misc_feature (14)..(14): Xaa can be any naturally occurring amino acid
  misc_feature (16)..(16): Xaa can be any naturally occurring amino acid
CCEYXCCXNPACTXGXCY

SEQ ID NO: 1037 - protein, 18 aa, Artificial Sequence
  Synthetically generated peptide
  VARIANT (5)..(8): Xaa = Any Amino Acid
  misc_feature (14)..(14): Xaa can be any naturally occurring amino acid
  misc_feature (17)..(17): Xaa can be any naturally occurring amino acid
CCEYXCCXNPACTXGCXY

SEQ ID NO: 1038 - protein, 17 aa, Artificial Sequence
  Synthetically generated peptide
  VARIANT (5)..(8): Xaa = Any Amino Acid
  misc_feature (15)..(15): Xaa can be any naturally occurring amino acid
CCEYXCCXNPACTGXCY

SEQ ID NO: 1039 - protein, 18 aa, Artificial Sequence
  Synthetically generated peptide
  VARIANT (5)..(8): Xaa = Any Amino Acid
  misc_feature (15)..(16): Xaa can be any naturally occurring amino acid
CCEYXCCXNPACTGXXCY

SEQ ID NO: 1040 - protein, 18 aa, Artificial Sequence
  Synthetically generated peptide
  VARIANT (5)..(8): Xaa = Any Amino Acid
  misc_feature (15)..(15): Xaa can be any naturally occurring amino acid
  misc_feature (17)..(17): Xaa can be any naturally occurring amino acid
CCEYXCCXNPACTGXCXY

SEQ ID NO: 1041 - protein, 17 aa, Artificial Sequence
  Synthetically generated peptide
  VARIANT (5)..(8): Xaa = Any Amino Acid
  misc_feature (16)..(16): Xaa can be any naturally occurring amino acid
CCEYXCCXNPACTGCXY

SEQ ID NO: 1042 - protein, 18 aa, Artificial Sequence
  Synthetically generated peptide
  VARIANT (5)..(8): Xaa = Any Amino Acid
  misc_feature (16)..(17): Xaa can be any naturally occurring amino acid
CCEYXCCXNPACTGCXXY

SEQ ID NO: 1043 - protein, 16 aa, Artificial Sequence
  Synthetically generated peptide
  VARIANT (5)..(9): Xaa = Any Amino Acid
CCEYXCCNXPACTGCY

SEQ ID NO: 1044 - protein, 17 aa, Artificial Sequence
  Synthetically generated peptide
  VARIANT (5)..(9): Xaa = Any Amino Acid
  misc_feature (10)..(10): Xaa can be any naturally occurring amino acid
CCEYXCCNXXPACTGCY

SEQ ID NO: 1045 - protein, 18 aa, Artificial Sequence
  Synthetically generated peptide
  VARIANT (5)..(9): Xaa = Any Amino Acid
  misc_feature (10)..(11): Xaa can be any naturally occurring amino acid
CCEYXCCNXXXPACTGCY

SEQ ID NO: 1046 - protein, 18 aa, Artificial Sequence
  Synthetically generated peptide
  VARIANT (5)..(9): Xaa = Any Amino Acid
  misc_feature (10)..(10): Xaa can be any naturally occurring amino acid
  misc_feature (12)..(12): Xaa can be any naturally occurring amino acid
CCEYXCCNXXPXACTGCY

SEQ ID NO: 1047 - protein, 18 aa, Artificial Sequence
  Synthetically generated peptide
  VARIANT (5)..(9): Xaa = Any Amino Acid
  misc_feature (10)..(10): Xaa can be any naturally occurring amino acid
  misc_feature (13)..(13): Xaa can be any naturally occurring amino acid
CCEYXCCNXXPAXCTGCY

SEQ ID NO: 1048 - protein, 18 aa, Artificial Sequence
  Synthetically generated peptide
  VARIANT (5)..(9): Xaa = Any Amino Acid
  misc_feature (10)..(10): Xaa can be any naturally occurring amino acid
  misc_feature (14)..(14): Xaa can be any naturally occurring amino acid
CCEYXCCNXXPACXTGCY

SEQ ID NO: 1049 - protein, 18 aa, Artificial Sequence
  Synthetically generated peptide
  VARIANT (5)..(9): Xaa = Any Amino Acid
  misc_feature (10)..(10): Xaa can be any naturally occurring amino acid
  misc_feature (15)..(15): Xaa can be any naturally occurring amino acid
CCEYXCCNXXPACTXGCY

SEQ ID NO: 1050 - protein, 18 aa, Artificial Sequence
  Synthetically generated peptide
  VARIANT (5)..(9): Xaa = Any Amino Acid
  misc_feature (10)..(10): Xaa can be any naturally occurring amino acid
  misc_feature (16)..(16): Xaa can be any naturally occurring amino acid
CCEYXCCNXXPACTGXCY

SEQ ID NO: 1051 - protein, 18 aa, Artificial Sequence
  Synthetically generated peptide
  VARIANT (5)..(9): Xaa = Any Amino Acid
  misc_feature (10)..(10): Xaa can be any naturally occurring amino acid
  misc_feature (17)..(17): Xaa can be any naturally occurring amino acid
CCEYXCCNXXPACTGCXY

SEQ ID NO: 1052 - protein, 17 aa, Artificial Sequence
  Synthetically generated peptide
  VARIANT (5)..(9): Xaa = Any Amino Acid
  misc_feature (11)..(11): Xaa can be any naturally occurring amino acid
CCEYXCCNXPXACTGCY

SEQ ID NO: 1053 - protein, 18 aa, Artificial Sequence
  Synthetically generated peptide
  VARIANT (5)..(9): Xaa = Any Amino Acid
  misc_feature (11)..(12): Xaa can be any naturally occurring amino acid
CCEYXCCNXPXXACTGCY

SEQ ID NO: 1054 - protein, 18 aa, Artificial Sequence
  Synthetically generated peptide
  VARIANT (5)..(9): Xaa = Any Amino Acid
  misc_feature (11)..(11): Xaa can be any naturally occurring amino acid
  misc_feature (13)..(13): Xaa can be any naturally occurring amino acid
CCEYXCCNXPXAXCTGCY

SEQ ID NO: 1055 - protein, 18 aa, Artificial Sequence
  Synthetically generated peptide
  VARIANT (5)..(9): Xaa = Any Amino Acid
  misc_feature (11)..(11): Xaa can be any naturally occurring amino acid
  misc_feature (14)..(14): Xaa can be any naturally occurring amino acid
CCEYXCCNXPXACXTGCY

SEQ ID NO: 1056 - protein, 18 aa, Artificial Sequence
  Synthetically generated peptide
  VARIANT (5)..(9): Xaa = Any Amino Acid
  misc_feature (11)..(11): Xaa can be any naturally occurring amino acid
  misc_feature (15)..(15): Xaa can be any naturally occurring amino acid
CCEYXCCNXPXACTXGCY

SEQ ID NO: 1057 - protein, 18 aa, Artificial Sequence
  Synthetically generated peptide
  VARIANT (5)..(9): Xaa = Any Amino Acid
  misc_feature (11)..(11): Xaa can be any naturally occurring amino acid
  misc_feature (16)..(16): Xaa can be any naturally occurring amino acid
CCEYXCCNXPXACTGXCY

SEQ ID NO: 1058 - protein, 18 aa, Artificial Sequence
  Synthetically generated peptide
  VARIANT (5)..(9): Xaa = Any Amino Acid
  misc_feature (11)..(11): Xaa can be any naturally occurring amino acid
  misc_feature (17)..(17): Xaa can be any naturally occurring amino acid
CCEYXCCNXPXACTGCXY

SEQ ID NO: 1059 - protein, 17 aa, Artificial Sequence
  Synthetically generated peptide
  VARIANT (5)..(9): Xaa = Any Amino Acid
  misc_feature (12)..(12): Xaa can be any naturally occurring amino acid
CCEYXCCNXPAXCTGCY

SEQ ID NO: 1060 - protein, 18 aa, Artificial Sequence
  Synthetically generated peptide
  VARIANT (5)..(9): Xaa = Any Amino Acid
  misc_feature (12)..(13): Xaa can be any naturally occurring amino acid
CCEYXCCNXPAXXCTGCY

SEQ ID NO: 1061 - protein, 18 aa, Artificial Sequence
  Synthetically generated peptide
  VARIANT (5)..(9): Xaa = Any Amino Acid
  misc_feature (12)..(12): Xaa can be any naturally occurring amino acid
  misc_feature (14)..(14): Xaa can be any naturally occurring amino acid
CCEYXCCNXPAXCXTGCY

SEQ ID NO: 1062 - protein, 18 aa, Artificial Sequence
  Synthetically generated peptide
  VARIANT (5)..(9): Xaa = Any Amino Acid
  misc_feature (12)..(12): Xaa can be any naturally occurring amino acid
  misc_feature (15)..(15): Xaa can be any naturally occurring amino acid
CCEYXCCNXPAXCTXGCY

SEQ ID NO: 1063 - protein, 18 aa, Artificial Sequence
  Synthetically generated peptide
  VARIANT (5)..(9): Xaa = Any Amino Acid
  misc_feature (12)..(12): Xaa can be any naturally occurring amino acid
  misc_feature (16)..(16): Xaa can be any naturally occurring amino acid
CCEYXCCNXPAXCTGXCY

SEQ ID NO: 1064 - protein, 18 aa, Artificial Sequence
  Synthetically generated peptide
  VARIANT (5)..(9): Xaa = Any Amino Acid
  misc_feature (12)..(12): Xaa can be any naturally occurring amino acid
  misc_feature (17)..(17): Xaa can be any naturally occurring amino acid
CCEYXCCNXPAXCTGCXY

SEQ ID NO: 1065 - protein, 17 aa, Artificial Sequence
  Synthetically generated peptide
  VARIANT (5)..(9): Xaa = Any Amino Acid
  misc_feature (13)..(13): Xaa can be any naturally occurring amino acid
CCEYXCCNXPACXTGCY

SEQ ID NO: 1066 - protein, 18 aa, Artificial Sequence
  Synthetically generated peptide
  VARIANT (5)..(9): Xaa = Any Amino Acid
  misc_feature (13)..(14): Xaa can be any naturally occurring amino acid
CCEYXCCNXPACXXTGCY

SEQ ID NO: 1067 - protein, 18 aa, Artificial Sequence
  Synthetically generated peptide
  VARIANT (5)..(9): Xaa = Any Amino Acid
  misc_feature (13)..(13): Xaa can be any naturally occurring amino acid
  misc_feature (15)..(15): Xaa can be any naturally occurring amino acid
CCEYXCCNXPACXTXGCY

SEQ ID NO: 1068 - protein, 18 aa, Artificial Sequence
  Synthetically generated peptide
  VARIANT (5)..(9): Xaa = Any Amino Acid
  misc_feature (13)..(13): Xaa can be any naturally occurring amino acid
  misc_feature (16)..(16): Xaa can be any naturally occurring amino acid
CCEYXCCNXPACXTGXCY

SEQ ID NO: 1069 - protein, 18 aa, Artificial Sequence
  Synthetically generated peptide
  VARIANT (5)..(9): Xaa = Any Amino Acid
  misc_feature (13)..(13): Xaa can be any naturally occurring amino acid
  misc_feature (17)..(17): Xaa can be any naturally occurring amino acid
CCEYXCCNXPACXTGCXY

SEQ ID NO: 1070 - protein, 17 aa, Artificial Sequence
  Synthetically generated peptide
  VARIANT (5)..(9): Xaa = Any Amino Acid
  misc_feature (14)..(14): Xaa can be any naturally occurring amino acid
CCEYXCCNXPACTXGCY

SEQ ID NO: 1071 - protein, 18 aa, Artificial Sequence
  Synthetically generated peptide
  VARIANT (5)..(9): Xaa = Any Amino Acid
  misc_feature (14)..(15): Xaa can be any naturally occurring amino acid
CCEYXCCNXPACTXXGCY

SEQ ID NO: 1072 - protein, 18 aa, Artificial Sequence
  Synthetically generated peptide
  VARIANT (5)..(9): Xaa = Any Amino Acid
  misc_feature (14)..(14): Xaa can be any naturally occurring amino acid
  misc_feature (16)..(16): Xaa can be any naturally occurring amino acid
CCEYXCCNXPACTXGXCY

SEQ ID NO: 1073 - protein, 18 aa, Artificial Sequence
  Synthetically generated peptide
  VARIANT (5)..(9): Xaa = Any Amino Acid
  misc_feature (14)..(14): Xaa can be any naturally occurring amino acid
  misc_feature (17)..(17): Xaa can be any naturally occurring amino acid
CCEYXCCNXPACTXGCXY

SEQ ID NO: 1074 - protein, 17 aa, Artificial Sequence
  Synthetically generated peptide
  VARIANT (5)..(9): Xaa = Any Amino Acid
  misc_feature (15)..(15): Xaa can be any naturally occurring amino acid
CCEYXCCNXPACTGXCY

SEQ ID NO: 1075 - protein, 18 aa, Artificial Sequence
  Synthetically generated peptide
  VARIANT (5)..(9): Xaa = Any Amino Acid
  misc_feature (15)..(16): Xaa can be any naturally occurring amino acid
CCEYXCCNXPACTGXXCY

SEQ ID NO: 1076 - protein, 18 aa, Artificial Sequence
  Synthetically generated peptide
  VARIANT (5)..(9): Xaa = Any Amino Acid
  misc_feature (15)..(15): Xaa can be any naturally occurring amino acid
  misc_feature (17)..(17): Xaa can be any naturally occurring amino acid
CCEYXCCNXPACTGXCXY

SEQ ID NO: 1077 - protein, 17 aa, Artificial Sequence
  Synthetically generated peptide
  VARIANT (5)..(9): Xaa = Any Amino Acid
  misc_feature (16)..(16): Xaa can be any naturally occurring amino acid
CCEYXCCNXPACTGCXY

SEQ ID NO: 1078 - protein, 18 aa, Artificial Sequence
  Synthetically generated peptide
  VARIANT (5)..(9): Xaa = Any Amino Acid
  misc_feature (16)..(17): Xaa can be any naturally occurring amino acid
CCEYXCCNXPACTGCXXY

SEQ ID NO: 1079 - protein, 16 aa, Artificial Sequence
  Synthetically generated peptide
  VARIANT (1)..(16): Xaa = Any Amino Acid
  VARIANT (5)..(10): Xaa = Any Amino Acid
CCEYXCCNPXACTGCY

SEQ ID NO: 1080 - protein, 17 aa, Artificial Sequence
  Synthetically generated peptide
  VARIANT (5)..(10): Xaa = Any Amino Acid
  misc_feature (11)..(11): Xaa can be any naturally occurring amino acid
CCEYXCCNPXXACTGCY

SEQ ID NO: 1081 - protein, 18 aa, Artificial Sequence
  Synthetically generated peptide
  VARIANT (5)..(10): Xaa = Any Amino Acid
  misc_feature (11)..(12): Xaa can be any naturally occurring amino acid
CCEYXCCNPXXXACTGCY

SEQ ID NO: 1082 - protein, 18 aa, Artificial Sequence
  Synthetically generated peptide
  VARIANT (5)..(10): Xaa = Any Amino Acid
  misc_feature (11)..(11): Xaa can be any naturally occurring amino acid
  misc_feature (13)..(13): Xaa can be any naturally occurring amino acid
CCEYXCCNPXXAXCTGCY

SEQ ID NO: 1083 - protein, 18 aa, Artificial Sequence
  Synthetically generated peptide
  VARIANT (5)..(10): Xaa = Any Amino Acid
  misc_feature (11)..(11): Xaa can be any naturally occurring amino acid
  misc_feature (14)..(14): Xaa can be any naturally occurring amino acid
CCEYXCCNPXXACXTGCY

SEQ ID NO: 1084 - protein, 18 aa, Artificial Sequence
  Synthetically generated peptide
  VARIANT (5)..(10): Xaa = Any Amino Acid
  misc_feature (11)..(11): Xaa can be any naturally occurring amino acid
  misc_feature (15)..(15): Xaa can be any naturally occurring amino acid
CCEYXCCNPXXACTXGCY

SEQ ID NO: 1085 - protein, 18 aa, Artificial Sequence
  Synthetically generated peptide
  VARIANT (5)..(10): Xaa = Any Amino Acid
  misc_feature (11)..(11): Xaa can be any naturally occurring amino acid
  misc_feature (16)..(16): Xaa can be any naturally occurring amino acid
CCEYXCCNPXXACTGXCY

SEQ ID NO: 1086 - protein, 18 aa, Artificial Sequence
  Synthetically generated peptide
  VARIANT (5)..(10): Xaa = Any Amino Acid
  misc_feature (11)..(11): Xaa can be any naturally occurring amino acid
  misc_feature (17)..(17): Xaa can be any naturally occurring amino acid
CCEYXCCNPXXACTGCXY

SEQ ID NO: 1087 - protein, 17 aa, Artificial Sequence
  Synthetically generated peptide
  VARIANT (5)..(10): Xaa = Any Amino Acid
  misc_feature (12)..(12): Xaa can be any naturally occurring amino acid
CCEYXCCNPXAXCTGCY

SEQ ID NO: 1088 - protein, 18 aa, Artificial Sequence
  Synthetically generated peptide
  VARIANT (5)..(10): Xaa = Any Amino Acid
  misc_feature (12)..(13): Xaa can be any naturally occurring amino acid
CCEYXCCNPXAXXCTGCY

SEQ ID NO: 1089 - protein, 18 aa, Artificial Sequence
  Synthetically generated peptide
  VARIANT (5)..(10): Xaa = Any Amino Acid
  misc_feature (12)..(12): Xaa can be any naturally occurring amino acid
  misc_feature (14)..(14): Xaa can be any naturally occurring amino acid
CCEYXCCNPXAXCXTGCY

SEQ ID NO: 1090 - protein, 18 aa, Artificial Sequence
  Synthetically generated peptide
  VARIANT (5)..(10): Xaa = Any Amino Acid
  misc_feature (12)..(12): Xaa can be any naturally occurring amino acid
  misc_feature (15)..(15): Xaa can be any naturally occurring amino acid
CCEYXCCNPXAXCTXGCY

SEQ ID NO: 1091 - protein, 18 aa, Artificial Sequence
  Synthetically generated peptide
  VARIANT (5)..(10): Xaa = Any Amino Acid
  misc_feature (12)..(12): Xaa can be any naturally occurring amino acid
  misc_feature (16)..(16): Xaa can be any naturally occurring amino acid
CCEYXCCNPXAXCTGXCY

SEQ ID NO: 1092 - protein, 17 aa, Artificial Sequence
  Synthetically generated peptide
  VARIANT (5)..(10): Xaa = Any Amino Acid
  misc_feature (13)..(13): Xaa can be any naturally occurring amino acid
CCEYXCCNPXACXTGCY

SEQ ID NO: 1093 - protein, 18 aa, Artificial Sequence
  Synthetically generated peptide
  VARIANT (5)..(10): Xaa = Any Amino Acid
  misc_feature (13)..(14): Xaa can be any naturally occurring amino acid
CCEYXCCNPXACXXTGCY

SEQ ID NO: 1094 - protein, 18 aa, Artificial Sequence
  Synthetically generated peptide
  VARIANT (5)..(10): Xaa = Any Amino Acid
  misc_feature (13)..(13): Xaa can be any naturally occurring amino acid
  misc_feature (15)..(15): Xaa can be any naturally occurring amino acid
CCEYXCCNPXACXTXGCY

SEQ ID NO: 1095 - protein, 18 aa, Artificial Sequence
  Synthetically generated peptide
  VARIANT (5)..(10): Xaa = Any Amino Acid
  misc_feature (13)..(13): Xaa can be any naturally occurring amino acid
  misc_feature (16)..(16): Xaa can be any naturally occurring amino acid
CCEYXCCNPXACXTGXCY

SEQ ID NO: 1096 - protein, 18 aa, Artificial Sequence
  Synthetically generated peptide
  VARIANT (5)..(10): Xaa = Any Amino Acid
  misc_feature (13)..(13): Xaa can be any naturally occurring amino acid
  misc_feature (17)..(17): Xaa can be any naturally occurring amino acid
CCEYXCCNPXACXTGCXY

SEQ ID NO: 1097 - protein, 17 aa, Artificial Sequence
  Synthetically generated peptide
  VARIANT (5)..(10): Xaa = Any Amino Acid
  misc_feature (14)..(14): Xaa can be any naturally occurring amino acid
CCEYXCCNPXACTXGCY

SEQ ID NO: 1098 - protein, 18 aa, Artificial Sequence
  Synthetically generated peptide
  VARIANT (5)..(10): Xaa = Any Amino Acid
  misc_feature (14)..(15): Xaa can be any naturally occurring amino acid
CCEYXCCNPXACTXXGCY

SEQ ID NO: 1099 - protein, 18 aa, Artificial Sequence
  Synthetically generated peptide
  VARIANT (5)..(10): Xaa = Any Amino Acid
  misc_feature (14)..(14): Xaa can be any naturally occurring amino acid
  misc_feature (16)..(16): Xaa can be any naturally occurring amino acid
CCEYXCCNPXACTXGXCY

SEQ ID NO: 1100 - protein, 18 aa, Artificial Sequence
  Synthetically generated peptide
  VARIANT (5)..(10): Xaa = Any Amino Acid
  misc_feature (14)..(14): Xaa can be any naturally occurring amino acid
  misc_feature (17)..(17): Xaa can be any naturally occurring amino acid
CCEYXCCNPXACTXGCXY

SEQ ID NO: 1101 - protein, 17 aa, Artificial Sequence
  Synthetically generated peptide
  VARIANT (5)..(10): Xaa = Any Amino Acid
  misc_feature (15)..(15): Xaa can be any naturally occurring amino acid
CCEYXCCNPXACTGXCY

SEQ ID NO: 1102 - protein, 18 aa, Artificial Sequence
  Synthetically generated peptide
  VARIANT (5)..(10): Xaa = Any Amino Acid
  misc_feature (15)..(16): Xaa can be any naturally occurring amino acid
CCEYXCCNPXACTGXXCY

SEQ ID NO: 1103 - protein, 18 aa, Artificial Sequence
  Synthetically generated peptide
  VARIANT (5)..(10): Xaa = Any Amino Acid
  misc_feature (15)..(15): Xaa can be any naturally occurring amino acid
  misc_feature (17)..(17): Xaa can be any naturally occurring amino acid
CCEYXCCNPXACTGXCXY

SEQ ID NO: 1104 - protein, 17 aa, Artificial Sequence
  Synthetically generated peptide
  VARIANT (5)..(10): Xaa = Any Amino Acid
  misc_feature (16)..(16): Xaa can be any naturally occurring amino acid
CCEYXCCNPXACTGCXY

SEQ ID NO: 1105 - protein, 18 aa, Artificial Sequence
  Synthetically generated peptide
  VARIANT (5)..(10): Xaa = Any Amino Acid
  misc_feature (16)..(17): Xaa can be any naturally occurring amino acid
CCEYXCCNPXACTGCXXY

SEQ ID NO: 1106 - protein, 16 aa, Artificial Sequence
  Synthetically generated peptide
  VARIANT (5)..(11): Xaa = Any Amino Acid
CCEYXCCNPAXCTGCY

SEQ ID NO: 1107 - protein, 17 aa, Artificial Sequence
  Synthetically generated peptide
  VARIANT (5)..(11): Xaa = Any Amino Acid
  misc_feature (12)..(12): Xaa can be any naturally occurring amino acid
CCEYXCCNPAXXCTGCY

SEQ ID NO: 1108 - protein, 18 aa, Artificial Sequence
  Synthetically generated peptide
  VARIANT (5)..(11): Xaa = Any Amino Acid
  misc_feature (12)..(13): Xaa can be any naturally occurring amino acid
CCEYXCCNPAXXXCTGCY

SEQ ID NO: 1109 - protein, 18 aa, Artificial Sequence
  Synthetically generated peptide
  VARIANT (5)..(11): Xaa = Any Amino Acid
  misc_feature (12)..(12): Xaa can be any naturally occurring amino acid
  misc_feature (14)..(14): Xaa can be any naturally occurring amino acid
CCEYXCCNPAXXCXTGCY

SEQ ID NO: 1110 - protein, 18 aa, Artificial Sequence
  Synthetically generated peptide
  VARIANT (5)..(11): Xaa = Any Amino Acid
  misc_feature (12)..(12): Xaa can be any naturally occurring amino acid
  misc_feature (15)..(15): Xaa can be any naturally occurring amino acid
CCEYXCCNPAXXCTXGCY

SEQ ID NO: 1111 - protein, 18 aa, Artificial Sequence
  Synthetically generated peptide
  VARIANT (5)..(11): Xaa = Any Amino Acid
  misc_feature (12)..(12): Xaa can be any naturally occurring amino acid
  misc_feature (16)..(16): Xaa can be any naturally occurring amino acid
CCEYXCCNPAXXCTGXCY

SEQ ID NO: 1112 - protein, 18 aa, Artificial Sequence
  Synthetically generated peptide
  VARIANT (5)..(11): Xaa = Any Amino Acid
  misc_feature (12)..(12): Xaa can be any naturally occurring amino acid
  misc_feature (17)..(17): Xaa can be any naturally occurring amino acid
CCEYXCCNPAXXCTGCXY

SEQ ID NO: 1113 - protein, 17 aa, Artificial Sequence
  Synthetically generated peptide
  VARIANT (5)..(11): Xaa = Any Amino Acid
  misc_feature (13)..(13): Xaa can be any naturally occurring amino acid
CCEYXCCNPAXCXTGCY

SEQ ID NO: 1114 - protein, 18 aa, Artificial Sequence
  Synthetically generated peptide
  VARIANT (5)..(11): Xaa = Any Amino Acid
  misc_feature (13)..(14): Xaa can be any naturally occurring amino acid
CCEYXCCNPAXCXXTGCY

SEQ ID NO: 1115 - protein, 18 aa, Artificial Sequence
  Synthetically generated peptide
  VARIANT (5)..(11): Xaa = Any Amino Acid
  misc_feature (13)..(13): Xaa can be any naturally occurring amino acid
  misc_feature (15)..(15): Xaa can be any naturally occurring amino acid
CCEYXCCNPAXCXTXGCY

SEQ ID NO: 1116 - protein, 18 aa, Artificial Sequence
  Synthetically generated peptide
  VARIANT (5)..(11): Xaa = Any Amino Acid
  misc_feature (13)..(13): Xaa can be any naturally occurring amino acid
  misc_feature (16)..(16): Xaa can be any naturally occurring amino acid
CCEYXCCNPAXCXTGXCY

SEQ ID NO: 1117 - protein, 18 aa, Artificial Sequence
  Synthetically generated peptide
  VARIANT (5)..(11): Xaa = Any Amino Acid
  misc_feature (13)..(13): Xaa can be any naturally occurring amino acid
  misc_feature (17)..(17): Xaa can be any naturally occurring amino acid
CCEYXCCNPAXCXTGCXY

SEQ ID NO: 1118 - protein, 17 aa, Artificial Sequence
  Synthetically generated peptide
  VARIANT (5)..(11): Xaa = Any Amino Acid
  misc_feature (14)..(14): Xaa can be any naturally occurring amino acid
CCEYXCCNPAXCTXGCY

SEQ ID NO: 1119 - protein, 18 aa, Artificial Sequence
  Synthetically generated peptide
  VARIANT (5)..(11): Xaa = Any Amino Acid
  misc_feature (14)..(15): Xaa can be any naturally occurring amino acid
CCEYXCCNPAXCTXXGCY

SEQ ID NO: 1120 - protein, 18 aa, Artificial Sequence
  Synthetically generated peptide
  VARIANT (5)..(11): Xaa = Any Amino Acid
  misc_feature (14)..(14): Xaa can be any naturally occurring amino acid
  misc_feature (16)..(16): Xaa can be any naturally occurring amino acid
CCEYXCCNPAXCTXGXCY

SEQ ID NO: 1121 - protein, 18 aa, Artificial Sequence
  Synthetically generated peptide
  VARIANT (5)..(11): Xaa = Any Amino Acid
  misc_feature (14)..(14): Xaa can be any naturally occurring amino acid
  misc_feature (17)..(17): Xaa can be any naturally occurring amino acid
CCEYXCCNPAXCTXGCXY

SEQ ID NO: 1122 - protein, 17 aa, Artificial Sequence
  Synthetically generated peptide
  VARIANT (5)..(11): Xaa = Any Amino Acid
  misc_feature (15)..(15): Xaa can be any naturally occurring amino acid
CCEYXCCNPAXCTGXCY

SEQ ID NO: 1123 - protein, 18 aa, Artificial Sequence
  Synthetically generated peptide
  VARIANT (5)..(11): Xaa = Any Amino Acid
  misc_feature (15)..(16): Xaa can be any naturally occurring amino acid
CCEYXCCNPAXCTGXXCY

SEQ ID NO: 1124 - protein, 18 aa, Artificial Sequence
  Synthetically generated peptide
  VARIANT (5)..(11): Xaa = Any Amino Acid
  misc_feature (15)..(15): Xaa can be any naturally occurring amino acid
  misc_feature (17)..(17): Xaa can be any naturally occurring amino acid
CCEYXCCNPAXCTGXCXY

SEQ ID NO: 1125 - protein, 17 aa, Artificial Sequence
  Synthetically generated peptide
  VARIANT (5)..(11): Xaa = Any Amino Acid
  misc_feature (16)..(16): Xaa can be any naturally occurring amino acid
CCEYXCCNPAXCTGCXY

SEQ ID NO: 1126 - protein, 18 aa, Artificial Sequence
  Synthetically generated peptide
  VARIANT (5)..(11): Xaa = Any Amino Acid
  misc_feature (16)..(17): Xaa can be any naturally occurring amino acid
CCEYXCCNPAXCTGCXXY

SEQ ID NO: 1127 - protein, 16 aa, Artificial Sequence
  Synthetically generated peptide
  VARIANT (5)..(12): Xaa = Any Amino Acid
CCEYXCCNPACXTGCY

SEQ ID NO: 1128 - protein, 17 aa, Artificial Sequence
  Synthetically generated peptide
  VARIANT (5)..(12): Xaa = Any Amino Acid
  misc_feature (13)..(13): Xaa can be any naturally occurring amino acid
CCEYXCCNPACXXTGCY

SEQ ID NO: 1129 - protein, 18 aa, Artificial Sequence
  Synthetically generated peptide
  VARIANT (5)..(12): Xaa = Any Amino Acid
  misc_feature (13)..(14): Xaa can be any naturally occurring amino acid
CCEYXCCNPACXXXTGCY

SEQ ID NO: 1130 - protein, 18 aa, Artificial Sequence
  Synthetically generated peptide
  VARIANT (5)..(12): Xaa = Any Amino Acid
  misc_feature (13)..(13): Xaa can be any naturally occurring amino acid
  misc_feature (15)..(15): Xaa can be any naturally occurring amino acid
CCEYXCCNPACXXTXGCY

SEQ ID NO: 1131 - protein, 18 aa, Artificial Sequence
  Synthetically generated peptide
  VARIANT (5)..(12): Xaa = Any Amino Acid
  misc_feature (13)..(13): Xaa can be any naturally occurring amino acid
  misc_feature (16)..(16): Xaa can be any naturally occurring amino acid
CCEYXCCNPACXXTGXCY

SEQ ID NO: 1132 - protein, 18 aa, Artificial Sequence
  Synthetically generated peptide
  VARIANT (5)..(12): Xaa = Any Amino Acid
  misc_feature (13)..(13): Xaa can be any naturally occurring amino acid
  misc_feature (17)..(17): Xaa can be any naturally occurring amino acid
CCEYXCCNPACXXTGCXY

SEQ ID NO: 1133 - protein, 17 aa, Artificial Sequence
  Synthetically generated peptide
  VARIANT (5)..(12): Xaa = Any Amino Acid
  misc_feature (14)..(14): Xaa can be any naturally occurring amino acid
CCEYXCCNPACXTXGCY

SEQ ID NO: 1134 - protein, 18 aa, Artificial Sequence
  Synthetically generated peptide
  VARIANT (5)..(12): Xaa = Any Amino Acid
  misc_feature (14)..(15): Xaa can be any naturally occurring amino acid
CCEYXCCNPACXTXXGCY

SEQ ID NO: 1135 - protein, 18 aa, Artificial Sequence
  Synthetically generated peptide
  VARIANT (5)..(12): Xaa = Any Amino Acid
  misc_feature (14)..(14): Xaa can be any naturally occurring amino acid
  misc_feature (16)..(16): Xaa can be any naturally occurring amino acid
CCEYXCCNPACXTXGXCY

SEQ ID NO: 1136 - protein, 18 aa, Artificial Sequence
  Synthetically generated peptide
  VARIANT (5)..(12): Xaa = Any Amino Acid
  misc_feature (14)..(14): Xaa can be any naturally occurring amino acid
  misc_feature (17)..(17): Xaa can be any naturally occurring amino acid
CCEYXCCNPACXTXGCXY

SEQ ID NO: 1137 - protein, 17 aa, Artificial Sequence
  Synthetically generated peptide
  VARIANT (5)..(12): Xaa = Any Amino Acid
  misc_feature (15)..(15): Xaa can be any naturally occurring amino acid
CCEYXCCNPACXTGXCY

SEQ ID NO: 1138 - protein, 18 aa, Artificial Sequence
  Synthetically generated peptide
  VARIANT (5)..(12): Xaa = Any Amino Acid
  misc_feature (15)..(16): Xaa can be any naturally occurring amino acid
CCEYXCCNPACXTGXXCY

SEQ ID NO: 1139 - protein, 18 aa, Artificial Sequence
  Synthetically generated peptide
  VARIANT (5)..(12): Xaa = Any Amino Acid
  misc_feature (15)..(15): Xaa can be any naturally occurring amino acid
  misc_feature (17)..(17): Xaa can be any naturally occurring amino acid
CCEYXCCNPACXTGXCXY

SEQ ID NO: 1140 - protein, 17 aa, Artificial Sequence
  Synthetically generated peptide
  VARIANT (5)..(12): Xaa = Any Amino Acid
  misc_feature (16)..(16): Xaa can be any naturally occurring amino acid
CCEYXCCNPACXTGCXY

SEQ ID NO: 1141 - protein, 18 aa, Artificial Sequence
  Synthetically generated peptide
  VARIANT (5)..(12): Xaa = Any Amino Acid
  misc_feature (16)..(17): Xaa can be any naturally occurring amino acid
CCEYXCCNPACXTGCXXY

SEQ ID NO: 1142 - protein, 16 aa, Artificial Sequence
  Synthetically generated peptide
  VARIANT (5)..(13): Xaa = Any Amino Acid
CCEYXCCNPACTXGCY

SEQ ID NO: 1143 - protein, 17 aa, Artificial Sequence
  Synthetically generated peptide
  VARIANT (5)..(13): Xaa = Any Amino Acid
  misc_feature (14)..(14): Xaa can be any naturally occurring amino acid
CCEYXCCNPACTXXGCY

SEQ ID NO: 1144 - protein, 18 aa, Artificial Sequence
  Synthetically generated peptide
  VARIANT (5)..(13): Xaa = Any Amino Acid
  misc_feature (14)..(15): Xaa can be any naturally occurring amino acid
CCEYXCCNPACTXXXGCY

SEQ ID NO: 1145 - protein, 18 aa, Artificial Sequence
  Synthetically generated peptide
  VARIANT (5)..(13): Xaa = Any Amino Acid
  misc_feature (14)..(14): Xaa can be any naturally occurring amino acid
  misc_feature (16)..(16): Xaa can be any naturally occurring amino acid
CCEYXCCNPACTXXGXCY

SEQ ID NO: 1146 - protein, 18 aa, Artificial Sequence
  Synthetically generated peptide
  VARIANT (5)..(13): Xaa = Any Amino Acid
  misc_feature (14)..(14): Xaa can be any naturally occurring amino acid
  misc_feature (17)..(17): Xaa can be any naturally occurring amino acid
CCEYXCCNPACTXXGCXY

SEQ ID NO: 1147 - protein, 17 aa, Artificial Sequence
  Synthetically generated peptide
  VARIANT (5)..(13): Xaa = Any Amino Acid
  misc_feature (15)..(15): Xaa can be any naturally occurring amino acid
CCEYXCCNPACTXGXCY

SEQ ID NO: 1148 - protein, 18 aa, Artificial Sequence
  Synthetically generated peptide
  VARIANT (5)..(13): Xaa = Any Amino Acid
  misc_feature (15)..(16): Xaa can be any naturally occurring amino acid
CCEYXCCNPACTXGXXCY

SEQ ID NO: 1149 - protein, 18 aa, Artificial Sequence
  Synthetically generated peptide
  VARIANT (5)..(13): Xaa = Any Amino Acid
  misc_feature (15)..(15): Xaa can be any naturally occurring amino acid
  misc_feature (17)..(17): Xaa can be any naturally occurring amino acid
CCEYXCCNPACTXGXCXY

SEQ ID NO: 1150 - protein, 17 aa, Artificial Sequence
  Synthetically generated peptide
  VARIANT (5)..(13): Xaa = Any Amino Acid
  misc_feature (16)..(16): Xaa can be any naturally occurring amino acid
CCEYXCCNPACTXGCXY

SEQ ID NO: 1151 - protein, 18 aa, Artificial Sequence
  Synthetically generated peptide
  VARIANT (5)..(13): Xaa = Any Amino Acid
  misc_feature (16)..(17): Xaa can be any naturally occurring amino acid
CCEYXCCNPACTXGCXXY

SEQ ID NO: 1152 - protein, 16 aa, Artificial Sequence
  Synthetically generated peptide
  VARIANT (5)..(14): Xaa = Any Amino Acid
CCEYXCCNPACTGXCY

SEQ ID NO: 1153 - protein, 17 aa, Artificial Sequence
  Synthetically generated peptide
  VARIANT (5)..(14): Xaa = Any Amino Acid
  misc_feature (15)..(15): Xaa can be any naturally occurring amino acid
CCEYXCCNPACTGXXCY

SEQ ID NO: 1154 - protein, 18 aa, Artificial Sequence
  Synthetically generated peptide
  VARIANT (5)..(14): Xaa = Any Amino Acid
  misc_feature (15)..(16): Xaa can be any naturally occurring amino acid
CCEYXCCNPACTGXXXCY

SEQ ID NO: 1155 - protein, 18 aa, Artificial Sequence
  Synthetically generated peptide
  VARIANT (5)..(14): Xaa = Any Amino Acid
  misc_feature (15)..(15): Xaa can be any naturally occurring amino acid
  misc_feature (17)..(17): Xaa can be any naturally occurring amino acid
CCEYXCCNPACTGXXCXY

SEQ ID NO: 1156 - protein, 17 aa, Artificial Sequence
  Synthetically generated peptide
  VARIANT (5)..(14): Xaa = Any Amino Acid
  misc_feature (16)..(16): Xaa can be any naturally occurring amino acid
CCEYXCCNPACTGXCXY

SEQ ID NO: 1157 - protein, 18 aa, Artificial Sequence
  Synthetically generated peptide
  VARIANT (5)..(14): Xaa = Any Amino Acid
  misc_feature (16)..(17): Xaa can be any naturally occurring amino acid
CCEYXCCNPACTGXCXXY

SEQ ID NO: 1158 - protein, 16 aa, Artificial Sequence
  Synthetically generated peptide
  VARIANT (1)..(16): Xaa = Any Amino Acid
  VARIANT (5)..(15): Xaa = Any Amino Acid
CCEYXCCNPACTGCXY

SEQ ID NO: 1159 - protein, 17 aa, Artificial Sequence
  Synthetically generated peptide
  VARIANT (5)..(15): Xaa = Any Amino Acid
  misc_feature (16)..(16): Xaa can be any naturally occurring amino acid
CCEYXCCNPACTGCXXY

SEQ ID NO: 1160 - protein, 18 aa, Artificial Sequence
  Synthetically generated peptide
  VARIANT (5)..(15): Xaa = Any Amino Acid
  misc_feature (16)..(17): Xaa can be any naturally occurring amino acid
CCEYXCCNPACTGCXXXY

SEQ ID NO: 1161 - protein, 15 aa, Artificial Sequence
  Synthetically generated peptide
  VARIANT (7)..(7): Xaa = Any Amino Acid
CCEYCCXNPACTGCY

SEQ ID NO: 1162 - protein, 16 aa, Artificial Sequence
  Synthetically generated peptide
  VARIANT (7)..(8): Xaa = Any Amino Acid
CCEYCCXXNPACTGCY

SEQ ID NO: 1163 - protein, 17 aa, Artificial Sequence
  Synthetically generated peptide
  VARIANT (7)..(8): Xaa = Any Amino Acid
  misc_feature (9)..(9): Xaa can be any naturally occurring amino acid
CCEYCCXXXNPACTGCY

SEQ ID NO: 1164 - protein, 18 aa, Artificial Sequence
  Synthetically generated peptide
  VARIANT (7)..(8): Xaa = Any Amino Acid
  misc_feature (9)..(10): Xaa can be any naturally occurring amino acid
CCEYCCXXXXNPACTGCY

SEQ ID NO: 1165 - protein, 18 aa, Artificial Sequence
  Synthetically generated peptide
  VARIANT (7)..(8): Xaa = Any Amino Acid
  misc_feature (9)..(9): Xaa can be any naturally occurring amino acid
  misc_feature (11)..(11): Xaa can be any naturally occurring amino acid
CCEYCCXXXNXPACTGCY

SEQ ID NO: 1166 - protein, 18 aa, Artificial Sequence
  Synthetically generated peptide
  VARIANT (7)..(8): Xaa = Any Amino Acid
  misc_feature (9)..(9): Xaa can be any naturally occurring amino acid
  misc_feature (12)..(12): Xaa can be any naturally occurring amino acid
CCEYCCXXXNPXACTGCY

SEQ ID NO: 1167 - protein, 18 aa, Artificial Sequence
  Synthetically generated peptide
  VARIANT (7)..(8): Xaa = Any Amino Acid
  misc_feature (9)..(9): Xaa can be any naturally occurring amino acid
  misc_feature (13)..(13): Xaa can be any naturally occurring amino acid
CCEYCCXXXNPAXCTGCY

SEQ ID NO: 1168 - protein, 18 aa, Artificial Sequence
  Synthetically generated peptide
  VARIANT (7)..(8): Xaa = Any Amino Acid
  misc_feature (9)..(9): Xaa can be any naturally occurring amino acid
  misc_feature (14)..(14): Xaa can be any naturally occurring amino acid
CCEYCCXXXNPACXTGCY

SEQ ID NO: 1169 - protein, 18 aa, Artificial Sequence
  Synthetically generated peptide
  VARIANT (7)..(8): Xaa = Any Amino Acid
  misc_feature (9)..(9): Xaa can be any naturally occurring amino acid
  misc_feature (15)..(15): Xaa can be any naturally occurring amino acid
CCEYCCXXXNPACTXGCY

SEQ ID NO: 1170 - protein, 18 aa, Artificial Sequence
  Synthetically generated peptide
  VARIANT (7)..(8): Xaa = Any Amino Acid
  misc_feature (9)..(9): Xaa can be any naturally occurring amino acid
  misc_feature (16)..(16): Xaa can be any naturally occurring amino acid
CCEYCCXXXNPACTGXCY

SEQ ID NO: 1171 - protein, 18 aa, Artificial Sequence
  Synthetically generated peptide
  VARIANT (7)..(8): Xaa = Any Amino Acid
  misc_feature (9)..(9): Xaa can be any naturally occurring amino acid
  misc_feature (17)..(17): Xaa can be any naturally occurring amino acid
CCEYCCXXXNPACTGCXY

SEQ ID NO: 1172 - protein, 17 aa, Artificial Sequence
  Synthetically generated peptide
  VARIANT (7)..(8): Xaa = Any Amino Acid
  misc_feature (10)..(10): Xaa can be any naturally occurring amino acid
CCEYCCXXNXPACTGCY

SEQ ID NO: 1173 - protein, 18 aa, Artificial Sequence
  Synthetically generated peptide
  VARIANT (7)..(8): Xaa = Any Amino Acid
  misc_feature (10)..(11): Xaa can be any naturally occurring amino acid
CCEYCCXXNXXPACTGCY

SEQ ID NO: 1174 - protein, 18 aa, Artificial Sequence
  Synthetically generated peptide
  VARIANT (7)..(8): Xaa = Any Amino Acid
  misc_feature (10)..(10): Xaa can be any naturally occurring amino acid
  misc_feature (12)..(12): Xaa can be any naturally occurring amino acid
CCEYCCXXNXPXACTGCY

SEQ ID NO: 1175 - protein, 18 aa, Artificial Sequence
  Synthetically generated peptide
  VARIANT (7)..(8): Xaa = Any Amino Acid
  misc_feature (10)..(10): Xaa can be any naturally occurring amino acid
  misc_feature (13)..(13): Xaa can be any naturally occurring amino acid
CCEYCCXXNXPAXCTGCY

SEQ ID NO: 1176 - protein, 18 aa, Artificial Sequence
  Synthetically generated peptide
  VARIANT (7)..(8): Xaa = Any Amino Acid
  misc_feature (10)..(10): Xaa can be any naturally occurring amino acid
  misc_feature (14)..(14): Xaa can be any naturally occurring amino acid
CCEYCCXXNXPACXTGCY

SEQ ID NO: 1177 - protein, 18 aa, Artificial Sequence
  Synthetically generated peptide
  VARIANT (7)..(8): Xaa = Any Amino Acid
  misc_feature (10)..(10): Xaa can be any naturally occurring amino acid
  misc_feature (15)..(15): Xaa can be any naturally occurring amino acid
CCEYCCXXNXPACTXGCY

SEQ ID NO: 1178 - protein, 18 aa, Artificial Sequence
  Synthetically generated peptide
  VARIANT (7)..(8): Xaa = Any Amino Acid
  misc_feature (10)..(10): Xaa can be any naturally occurring amino acid
  misc_feature (16)..(16): Xaa can be any naturally occurring amino acid
CCEYCCXXNXPACTGXCY

SEQ ID NO: 1179 - protein, 18 aa, Artificial Sequence
  Synthetically generated peptide
  VARIANT (7)..(8): Xaa = Any Amino Acid
  misc_feature (10)..(10): Xaa can be any naturally occurring amino acid
  misc_feature (17)..(17): Xaa can be any naturally occurring amino acid
CCEYCCXXNXPACTGCXY

SEQ ID NO: 1180 - protein, 17 aa, Artificial Sequence
  Synthetically generated peptide
  VARIANT (7)..(8): Xaa = Any Amino Acid
  misc_feature (11)..(11): Xaa can be any naturally occurring amino acid
CCEYCCXXNPXACTGCY

SEQ ID NO: 1181 - protein, 18 aa, Artificial Sequence
  Synthetically generated peptide
  VARIANT (7)..(8): Xaa = Any Amino Acid
  misc_feature (11)..(12): Xaa can be any naturally occurring amino acid
CCEYCCXXNPXXACTGCY

SEQ ID NO: 1182 - protein, 18 aa, Artificial Sequence
  Synthetically generated peptide
  VARIANT (7)..(8): Xaa = Any Amino Acid
  misc_feature (11)..(11): Xaa can be any naturally occurring amino acid
  misc_feature (13)..(13): Xaa can be any naturally occurring amino acid
CCEYCCXXNPXAXCTGCY

SEQ ID NO: 1183 - protein, 18 aa, Artificial Sequence
  Synthetically generated peptide
  VARIANT (7)..(8): Xaa = Any Amino Acid
  misc_feature (11)..(11): Xaa can be any naturally occurring amino acid
  misc_feature (14)..(14): Xaa can be any naturally occurring amino acid
CCEYCCXXNPXACXTGCY

SEQ ID NO: 1184 - protein, 18 aa, Artificial Sequence
  Synthetically generated peptide
  VARIANT (7)..(8): Xaa = Any Amino Acid
  misc_feature (11)..(11): Xaa can be any naturally occurring amino acid
  misc_feature (15)..(15): Xaa can be any naturally occurring amino acid
CCEYCCXXNPXACTXGCY

SEQ ID NO: 1185 - protein, 18 aa, Artificial Sequence
  Synthetically generated peptide
  VARIANT (7)..(8): Xaa = Any Amino Acid
  misc_feature (11)..(11): Xaa can be any naturally occurring amino acid
  misc_feature (16)..(16): Xaa can be any naturally occurring amino acid
CCEYCCXXNPXACTGXCY

SEQ ID NO: 1186 - protein, 18 aa, Artificial Sequence
  Synthetically generated peptide
  VARIANT (7)..(8): Xaa = Any Amino Acid
  misc_feature (11)..(11): Xaa can be any naturally occurring amino acid
  misc_feature (17)..(17): Xaa can be any naturally occurring amino acid
CCEYCCXXNPXACTGCXY

SEQ ID NO: 1187 - protein, 17 aa, Artificial Sequence
  Synthetically generated peptide
  VARIANT (7)..(8): Xaa = Any Amino Acid
  misc_feature (12)..(12): Xaa can be any naturally occurring amino acid
CCEYCCXXNPAXCTGCY

SEQ ID NO: 1188 - protein, 18 aa, Artificial Sequence
  Synthetically generated peptide
  VARIANT (7)..(8): Xaa = Any Amino Acid
  misc_feature (12)..(13): Xaa can be any naturally occurring amino acid
CCEYCCXXNPAXXCTGCY

SEQ ID NO: 1189 - protein, 18 aa, Artificial Sequence
  Synthetically generated peptide
  VARIANT (7)..(8): Xaa = Any Amino Acid
  misc_feature (12)..(12): Xaa can be any naturally occurring amino acid
  misc_feature (14)..(14): Xaa can be any naturally occurring amino acid
CCEYCCXXNPAXCXTGCY

SEQ ID NO: 1190 - protein, 18 aa, Artificial Sequence
  Synthetically generated peptide
  VARIANT (7)..(8): Xaa = Any Amino Acid
  misc_feature (12)..(12): Xaa can be any naturally occurring amino acid
  misc_feature (15)..(15): Xaa can be any naturally occurring amino acid
CCEYCCXXNPAXCTXGCY

SEQ ID NO: 1191 - protein, 18 aa, Artificial Sequence
  Synthetically generated peptide
  VARIANT (7)..(8): Xaa = Any Amino Acid
  misc_feature (12)..(12): Xaa can be any naturally occurring amino acid
  misc_feature (16)..(16): Xaa can be any naturally occurring amino acid
CCEYCCXXNPAXCTGXCY

SEQ ID NO: 1192 - protein, 18 aa, Artificial Sequence
  Synthetically generated peptide
  VARIANT (7)..(8): Xaa = Any Amino Acid
  misc_feature (12)..(12): Xaa can be any naturally occurring amino acid
  misc_feature (17)..(17): Xaa can be any naturally occurring amino acid
CCEYCCXXNPAXCTGCXY

SEQ ID NO: 1193 - protein, 17 aa, Artificial Sequence
  Synthetically generated peptide
  VARIANT (7)..(8): Xaa = Any Amino Acid
  misc_feature (13)..(13): Xaa can be any naturally occurring amino acid
CCEYCCXXNPACXTGCY

SEQ ID NO: 1194 - protein, 18 aa, Artificial Sequence
  Synthetically generated peptide
  VARIANT (7)..(8): Xaa = Any Amino Acid
  misc_feature (13)..(14): Xaa can be any naturally occurring amino acid
CCEYCCXXNPACXXTGCY

SEQ ID NO: 1195 - protein, 18 aa, Artificial Sequence
  Synthetically generated peptide
  VARIANT (7)..(8): Xaa = Any Amino Acid
  misc_feature (13)..(13): Xaa can be any naturally occurring amino acid
  misc_feature (15)..(15): Xaa can be any naturally occurring amino acid
CCEYCCXXNPACXTXGCY

SEQ ID NO: 1196 - protein, 18 aa, Artificial Sequence
  Synthetically generated peptide
  VARIANT (7)..(8): Xaa = Any Amino Acid
  misc_feature (13)..(13): Xaa can be any naturally occurring amino acid
  misc_feature (16)..(16): Xaa can be any naturally occurring amino acid
CCEYCCXXNPACXTGXCY

SEQ ID NO: 1197 - protein, 18 aa, Artificial Sequence
  Synthetically generated peptide
  VARIANT (7)..(8): Xaa = Any Amino Acid
  misc_feature (13)..(13): Xaa can be any naturally occurring amino acid
  misc_feature (17)..(17): Xaa can be any naturally occurring amino acid
CCEYCCXXNPACXTGCXY

SEQ ID NO: 1198 - protein, 17 aa, Artificial Sequence
  Synthetically generated peptide
  VARIANT (7)..(8): Xaa = Any Amino Acid
  misc_feature (14)..(14): Xaa can be any naturally occurring amino acid
CCEYCCXXNPACTXGCY

SEQ ID NO: 1199 - protein, 18 aa, Artificial Sequence
  Synthetically generated peptide
  VARIANT (7)..(8): Xaa = Any Amino Acid
  misc_feature (14)..(15): Xaa can be any naturally occurring amino acid
CCEYCCXXNPACTXXGCY

SEQ ID NO: 1200 - protein, 18 aa, Artificial Sequence
  Synthetically generated peptide
  VARIANT (7)..(8): Xaa = Any Amino Acid
  misc_feature (14)..(14): Xaa can be any naturally occurring amino acid
  misc_feature (16)..(16): Xaa can be any naturally occurring amino acid
CCEYCCXXNPACTXGXCY

SEQ ID NO: 1201 - protein, 18 aa, Artificial Sequence
  Synthetically generated peptide
  VARIANT (7)..(8): Xaa = Any Amino Acid
  misc_feature (14)..(14): Xaa can be any naturally occurring amino acid
  misc_feature (17)..(17): Xaa can be any naturally occurring amino acid
CCEYCCXXNPACTXGCXY

SEQ ID NO: 1202 - protein, 17 aa, Artificial Sequence
  Synthetically generated peptide
  VARIANT (7)..(8): Xaa = Any Amino Acid
  misc_feature (15)..(15): Xaa can be any naturally occurring amino acid
CCEYCCXXNPACTGXCY

SEQ ID NO: 1203 - protein, 18 aa, Artificial Sequence
  Synthetically generated peptide
  VARIANT (7)..(8): Xaa = Any Amino Acid
  misc_feature (15)..(16): Xaa can be any naturally occurring amino acid
CCEYCCXXNPACTGXXCY

SEQ ID NO: 1204 - protein, 18 aa, Artificial Sequence
  Synthetically generated peptide
  VARIANT (7)..(8): Xaa = Any Amino Acid
  misc_feature (15)..(15): Xaa can be any naturally occurring amino acid
  misc_feature (17)..(17): Xaa can be any naturally occurring amino acid
CCEYCCXXNPACTGXCXY

SEQ ID NO: 1205 - protein, 17 aa, Artificial Sequence
  Synthetically generated peptide
  VARIANT (7)..(8): Xaa = Any Amino Acid
  misc_feature (16)..(16): Xaa can be any naturally occurring amino acid
CCEYCCXXNPACTGCXY

SEQ ID NO: 1206 - protein, 18 aa, Artificial Sequence
  Synthetically generated peptide
  VARIANT (7)..(8): Xaa = Any Amino Acid
  misc_feature (16)..(17): Xaa can be any naturally occurring amino acid
CCEYCCXXNPACTGCXXY

SEQ ID NO: 1207 - protein, 16 aa, Artificial Sequence
  Synthetically generated peptide
  VARIANT (7)..(9): Xaa = Any Amino Acid
CCEYCCXNXPACTGCY

SEQ ID NO: 1208 - protein, 17 aa, Artificial Sequence
  Synthetically generated peptide
  VARIANT (7)..(9): Xaa = Any Amino Acid
  misc_feature (10)..(10): Xaa can be any naturally occurring amino acid
CCEYCCXNXXPACTGCY

SEQ ID NO: 1209 - protein, 18 aa, Artificial Sequence
  Synthetically generated peptide
  VARIANT (7)..(9): Xaa = Any Amino Acid
  misc_feature (10)..(11): Xaa can be any naturally occurring amino acid
CCEYCCXNXXXPACTGCY

SEQ ID NO: 1210 - protein, 18 aa, Artificial Sequence
  Synthetically generated peptide
  VARIANT (7)..(9): Xaa = Any Amino Acid
  misc_feature (10)..(10): Xaa can be any naturally occurring amino acid
  misc_feature (12)..(12): Xaa can be any naturally occurring amino acid
CCEYCCXNXXPXACTGCY

SEQ ID NO: 1211 - protein, 18 aa, Artificial Sequence
  Synthetically generated peptide
  VARIANT (7)..(9): Xaa = Any Amino Acid
  misc_feature (10)..(10): Xaa can be any naturally occurring amino acid
  misc_feature (13)..(13): Xaa can be any naturally occurring amino acid
CCEYCCXNXXPAXCTGCY

SEQ ID NO: 1212 - protein, 18 aa, Artificial Sequence
  Synthetically generated peptide
  VARIANT (7)..(9): Xaa = Any Amino Acid
  misc_feature (10)..(10): Xaa can be any naturally occurring amino acid
  misc_feature (14)..(14): Xaa can be any naturally occurring amino acid
CCEYCCXNXXPACXTGCY

SEQ ID NO: 1213 - protein, 18 aa, Artificial Sequence
  Synthetically generated peptide
  VARIANT (7)..(9): Xaa = Any Amino Acid
  misc_feature (10)..(10): Xaa can be any naturally occurring amino acid
  misc_feature (15)..(15): Xaa can be any naturally occurring amino acid
CCEYCCXNXXPACTXGCY

SEQ ID NO: 1214 - protein, 18 aa, Artificial Sequence
  Synthetically generated peptide
  VARIANT (7)..(9): Xaa = Any Amino Acid
  misc_feature (10)..(10): Xaa can be any naturally occurring amino acid
  misc_feature (16)..(16): Xaa can be any naturally occurring amino acid
CCEYCCXNXXPACTGXCY

SEQ ID NO: 1215 - protein, 18 aa, Artificial Sequence
  Synthetically generated peptide
  VARIANT (7)..(9): Xaa = Any Amino Acid
  misc_feature (10)..(10): Xaa can be any naturally occurring amino acid
  misc_feature (17)..(17): Xaa can be any naturally occurring amino acid
CCEYCCXNXXPACTGCXY

SEQ ID NO: 1216 - protein, 17 aa, Artificial Sequence
  Synthetically generated peptide
  VARIANT (7)..(9): Xaa = Any Amino Acid
  misc_feature (11)..(11): Xaa can be any naturally occurring amino acid
CCEYCCXNXPXACTGCY

SEQ ID NO: 1217 - protein, 18 aa, Artificial Sequence
  Synthetically generated peptide
  VARIANT (7)..(9): Xaa = Any Amino Acid
  misc_feature (11)..(12): Xaa can be any naturally occurring amino acid
CCEYCCXNXPXXACTGCY

SEQ ID NO: 1218 - protein, 18 aa, Artificial Sequence
  Synthetically generated peptide
  VARIANT (7)..(9): Xaa = Any Amino Acid
  misc_feature (11)..(11): Xaa can be any naturally occurring amino acid
  misc_feature (13)..(13): Xaa can be any naturally occurring amino acid
CCEYCCXNXPXAXCTGCY

SEQ ID NO: 1219 - protein, 18 aa, Artificial Sequence
  Synthetically generated peptide
  VARIANT (7)..(9): Xaa = Any Amino Acid
  misc_feature (11)..(11): Xaa can be any naturally occurring amino acid
  misc_feature (14)..(14): Xaa can be any naturally occurring amino acid
CCEYCCXNXPXACXTGCY

SEQ ID NO: 1220 - protein, 18 aa, Artificial Sequence
  Synthetically generated peptide
  VARIANT (7)..(9): Xaa = Any Amino Acid
  misc_feature (11)..(11): Xaa can be any naturally occurring amino acid
  misc_feature (15)..(15): Xaa can be any naturally occurring amino acid
CCEYCCXNXPXACTXGCY

SEQ ID NO: 1221 - protein, 18 aa, Artificial Sequence
  Synthetically generated peptide
  VARIANT (7)..(9): Xaa = Any Amino Acid
  misc_feature (11)..(11): Xaa can be any naturally occurring amino acid
  misc_feature (16)..(16): Xaa can be any naturally occurring amino acid
CCEYCCXNXPXACTGXCY

SEQ ID NO: 1222 - protein, 18 aa, Artificial Sequence
  Synthetically generated peptide
  VARIANT (7)..(9): Xaa = Any Amino Acid
  misc_feature (11)..(11): Xaa can be any naturally occurring amino acid
  misc_feature (17)..(17): Xaa can be any naturally occurring amino acid
CCEYCCXNXPXACTGCXY

SEQ ID NO: 1223 - protein, 17 aa, Artificial Sequence
  Synthetically generated peptide
  VARIANT (7)..(9): Xaa = Any Amino Acid
  misc_feature (12)..(12): Xaa can be any naturally occurring amino acid
CCEYCCXNXPAXCTGCY

SEQ ID NO: 1224 - protein, 18 aa, Artificial Sequence
  Synthetically generated peptide
  VARIANT (7)..(9): Xaa = Any Amino Acid
  misc_feature (12)..(13): Xaa can be any naturally occurring amino acid
CCEYCCXNXPAXXCTGCY

SEQ ID NO: 1225 - protein, 18 aa, Artificial Sequence
  Synthetically generated peptide
  VARIANT (7)..(9): Xaa = Any Amino Acid
  misc_feature (12)..(12): Xaa can be any naturally occurring amino acid
  misc_feature (14)..(14): Xaa can be any naturally occurring amino acid
CCEYCCXNXPAXCXTGCY

SEQ ID NO: 1226 - protein, 18 aa, Artificial Sequence
  Synthetically generated peptide
  VARIANT (7)..(9): Xaa = Any Amino Acid
  misc_feature (12)..(12): Xaa can be any naturally occurring amino acid
  misc_feature (15)..(15): Xaa can be any naturally occurring amino acid
CCEYCCXNXPAXCTXGCY

SEQ ID NO: 1227 - protein, 18 aa, Artificial Sequence
  Synthetically generated peptide
  VARIANT (7)..(9): Xaa = Any Amino Acid
  misc_feature (12)..(12): Xaa can be any naturally occurring amino acid
  misc_feature (16)..(16): Xaa can be any naturally occurring amino acid
CCEYCCXNXPAXCTGXCY

SEQ ID NO: 1228 - protein, 18 aa, Artificial Sequence
  Synthetically generated peptide
  VARIANT (7)..(9): Xaa = Any Amino Acid
  misc_feature (12)..(12): Xaa can be any naturally occurring amino acid
  misc_feature (17)..(17): Xaa can be any naturally occurring amino acid
CCEYCCXNXPAXCTGCXY

SEQ ID NO: 1229 - protein, 17 aa, Artificial Sequence
  Synthetically generated peptide
  VARIANT (7)..(9): Xaa = Any Amino Acid
  misc_feature (13)..(13): Xaa can be any naturally occurring amino acid
CCEYCCXNXPACXTGCY

SEQ ID NO: 1230 - protein, 18 aa, Artificial Sequence
  Synthetically generated peptide
  VARIANT (7)..(9): Xaa = Any Amino Acid
  misc_feature (13)..(14): Xaa can be any naturally occurring amino acid
CCEYCCXNXPACXXTGCY

SEQ ID NO: 1231 - protein, 18 aa, Artificial Sequence
  Synthetically generated peptide
  VARIANT (7)..(9): Xaa = Any Amino Acid
  misc_feature (13)..(13): Xaa can be any naturally occurring amino acid
  misc_feature (15)..(15): Xaa can be any naturally occurring amino acid
CCEYCCXNXPACXTXGCY

SEQ ID NO: 1232 - protein, 18 aa, Artificial Sequence
  Synthetically generated peptide
  VARIANT (7)..(9): Xaa = Any Amino Acid
  misc_feature (13)..(13): Xaa can be any naturally occurring amino acid
  misc_feature (16)..(16): Xaa can be any naturally occurring amino acid
CCEYCCXNXPACXTGXCY

SEQ ID NO: 1233 - protein, 18 aa, Artificial Sequence
  Synthetically generated peptide
  VARIANT (7)..(9): Xaa = Any Amino Acid
  misc_feature (13)..(13): Xaa can be any naturally occurring amino acid
  misc_feature (17)..(17): Xaa can be any naturally occurring amino acid
CCEYCCXNXPACXTGCXY

SEQ ID NO: 1234 - protein, 17 aa, Artificial Sequence
  Synthetically generated peptide
  VARIANT (7)..(9): Xaa = Any Amino Acid
  misc_feature (14)..(14): Xaa can be any naturally occurring amino acid
CCEYCCXNXPACTXGCY

SEQ ID NO: 1235 - protein, 18 aa, Artificial Sequence
  Synthetically generated peptide
  VARIANT (7)..(9): Xaa = Any Amino Acid
  misc_feature (14)..(15): Xaa can be any naturally occurring amino acid
CCEYCCXNXPACTXXGCY

SEQ ID NO: 1236 - protein, 18 aa, Artificial Sequence
  Synthetically generated peptide
  VARIANT (7)..(9): Xaa = Any Amino Acid
  misc_feature (14)..(14): Xaa can be any naturally occurring amino acid
  misc_feature (16)..(16): Xaa can be any naturally occurring amino acid
CCEYCCXNXPACTXGXCY

SEQ ID NO: 1237 - protein, 18 aa, Artificial Sequence
  Synthetically generated peptide
  VARIANT (7)..(9): Xaa = Any Amino Acid
  misc_feature (14)..(14): Xaa can be any naturally occurring amino acid
  misc_feature (17)..(17): Xaa can be any naturally occurring amino acid
CCEYCCXNXPACTXGCXY

SEQ ID NO: 1238 - protein, 17 aa, Artificial Sequence
  Synthetically generated peptide
  VARIANT (7)..(9): Xaa = Any Amino Acid
  misc_feature (15)..(15): Xaa can be any naturally occurring amino acid
CCEYCCXNXPACTGXCY

SEQ ID NO: 1239 - protein, 18 aa, Artificial Sequence
  Synthetically generated peptide
  VARIANT (7)..(9): Xaa = Any Amino Acid
  misc_feature (15)..(16): Xaa can be any naturally occurring amino acid
CCEYCCXNXPACTGXXCY

SEQ ID NO: 1240 - protein, 18 aa, Artificial Sequence
  Synthetically generated peptide
  VARIANT (7)..(9): Xaa = Any Amino Acid
  misc_feature (15)..(15): Xaa can be any naturally occurring amino acid
  misc_feature (17)..(17): Xaa can be any naturally occurring amino acid
CCEYCCXNXPACTGXCXY

SEQ ID NO: 1241 - protein, 17 aa, Artificial Sequence
  Synthetically generated peptide
  VARIANT (7)..(9): Xaa = Any Amino Acid
  misc_feature (16)..(16): Xaa can be any naturally occurring amino acid
CCEYCCXNXPACTGCXY

SEQ ID NO: 1242 - protein, 18 aa, Artificial Sequence
  Synthetically generated peptide
  VARIANT (7)..(9): Xaa = Any Amino Acid
  misc_feature (16)..(17): Xaa can be any naturally occurring amino acid
CCEYCCXNXPACTGCXXY

SEQ ID NO: 1243 - protein, 16 aa, Artificial Sequence
  Synthetically generated peptide
  VARIANT (7)..(10): Xaa = Any Amino Acid
CCEYCCXNPXACTGCY

SEQ ID NO: 1244 - protein, 17 aa, Artificial Sequence
  Synthetically generated peptide
  VARIANT (7)..(10): Xaa = Any Amino Acid
  misc_feature (11)..(11): Xaa can be any naturally occurring amino acid
CCEYCCXNPXXACTGCY

SEQ ID NO: 1245 - protein, 18 aa, Artificial Sequence
  Synthetically generated peptide
  VARIANT (7)..(10): Xaa = Any Amino Acid
  misc_feature (11)..(12): Xaa can be any naturally occurring amino acid
CCEYCCXNPXXXACTGCY

SEQ ID NO: 1246 - protein, 18 aa, Artificial Sequence
  Synthetically generated peptide
  VARIANT (7)..(10): Xaa = Any Amino Acid
  misc_feature (11)..(11): Xaa can be any naturally occurring amino acid
  misc_feature (13)..(13): Xaa can be any naturally occurring amino acid
CCEYCCXNPXXAXCTGCY

SEQ ID NO: 1247 - protein, 18 aa, Artificial Sequence
  Synthetically generated peptide
  VARIANT (7)..(10): Xaa = Any Amino Acid
  misc_feature (11)..(11): Xaa can be any naturally occurring amino acid
  misc_feature (14)..(14): Xaa can be any naturally occurring amino acid
CCEYCCXNPXXACXTGCY

SEQ ID NO: 1248 - protein, 18 aa, Artificial Sequence
  Synthetically generated peptide
  VARIANT (7)..(10): Xaa = Any Amino Acid
  misc_feature (11)..(11): Xaa can be any naturally occurring amino acid
  misc_feature (15)..(15): Xaa can be any naturally occurring amino acid
CCEYCCXNPXXACTXGCY

SEQ ID NO: 1249 - protein, 18 aa, Artificial Sequence
  Synthetically generated peptide
  VARIANT (7)..(10): Xaa = Any Amino Acid
  misc_feature (11)..(11): Xaa can be any naturally occurring amino acid
  misc_feature (16)..(16): Xaa can be any naturally occurring amino acid
CCEYCCXNPXXACTGXCY

SEQ ID NO: 1250 - protein, 18 aa, Artificial Sequence
  Synthetically generated peptide
  VARIANT (7)..(10): Xaa = Any Amino Acid
  misc_feature (11)..(11): Xaa can be any naturally occurring amino acid
  misc_feature (17)..(17): Xaa can be any naturally occurring amino acid
CCEYCCXNPXXACTGCXY

SEQ ID NO: 1251 - protein, 17 aa, Artificial Sequence
  Synthetically generated peptide
  VARIANT (7)..(10): Xaa = Any Amino Acid
  misc_feature (12)..(12): Xaa can be any naturally occurring amino acid
CCEYCCXNPXAXCTGCY

SEQ ID NO: 1252 - protein, 18 aa, Artificial Sequence
  Synthetically generated peptide
  VARIANT (7)..(10): Xaa = Any Amino Acid
  misc_feature (12)..(13): Xaa can be any naturally occurring amino acid
CCEYCCXNPXAXXCTGCY

SEQ ID NO: 1253 - protein, 18 aa, Artificial Sequence
  Synthetically generated peptide
  VARIANT (7)..(10): Xaa = Any Amino Acid
  misc_feature (12)..(12): Xaa can be any naturally occurring amino acid
  misc_feature (14)..(14): Xaa can be any naturally occurring amino acid
CCEYCCXNPXAXCXTGCY

SEQ ID NO: 1254 - protein, 18 aa, Artificial Sequence
  Synthetically generated peptide
  VARIANT (7)..(10): Xaa = Any Amino Acid
  misc_feature (12)..(12): Xaa can be any naturally occurring amino acid
  misc_feature (15)..(15): Xaa can be any naturally occurring amino acid
CCEYCCXNPXAXCTXGCY

SEQ ID NO: 1255 - protein, 18 aa, Artificial Sequence
  Synthetically generated peptide
  VARIANT (7)..(10): Xaa = Any Amino Acid
  misc_feature (12)..(12): Xaa can be any naturally occurring amino acid
  misc_feature (16)..(16): Xaa can be any naturally occurring amino acid
CCEYCCXNPXAXCTGXCY

SEQ ID NO: 1256 - protein, 18 aa, Artificial Sequence
  Synthetically generated peptide
  VARIANT (7)..(10): Xaa = Any Amino Acid
  misc_feature (12)..(12): Xaa can be any naturally occurring amino acid
  misc_feature (17)..(17): Xaa can be any naturally occurring amino acid
CCEYCCXNPXAXCTGCXY

SEQ ID NO: 1257 - protein, 17 aa, Artificial Sequence
  Synthetically generated peptide
  VARIANT (7)..(10): Xaa = Any Amino Acid
  misc_feature (13)..(13): Xaa can be any naturally occurring amino acid
CCEYCCXNPXACXTGCY

SEQ ID NO: 1258 - protein, 18 aa, Artificial Sequence
  Synthetically generated peptide
  VARIANT (7)..(10): Xaa = Any Amino Acid
  misc_feature (13)..(14): Xaa can be any naturally occurring amino acid
CCEYCCXNPXACXXTGCY

SEQ ID NO: 1259 - protein, 18 aa, Artificial Sequence
  Synthetically generated peptide
  VARIANT (7)..(10): Xaa = Any Amino Acid
  misc_feature (13)..(13): Xaa can be any naturally occurring amino acid
  misc_feature (15)..(15): Xaa can be any naturally occurring amino acid
CCEYCCXNPXACXTXGCY

SEQ ID NO: 1260 - protein, 18 aa, Artificial Sequence
  Synthetically generated peptide
  VARIANT (7)..(10): Xaa = Any Amino Acid
  misc_feature (13)..(13): Xaa can be any naturally occurring amino acid
  misc_feature (16)..(16): Xaa can be any naturally occurring amino acid
CCEYCCXNPXACXTGXCY

SEQ ID NO: 1261 - protein, 18 aa, Artificial Sequence
  Synthetically generated peptide
  VARIANT (7)..(10): Xaa = Any Amino Acid
  misc_feature (13)..(13): Xaa can be any naturally occurring amino acid
  misc_feature (17)..(17): Xaa can be any naturally occurring amino acid
CCEYCCXNPXACXTGCXY

SEQ ID NO: 1262 - protein, 17 aa, Artificial Sequence
  Synthetically generated peptide
  VARIANT (7)..(10): Xaa = Any Amino Acid
  misc_feature (14)..(14): Xaa can be any naturally occurring amino acid
CCEYCCXNPXACTXGCY

SEQ ID NO: 1263 - protein, 18 aa, Artificial Sequence
  Synthetically generated peptide
  VARIANT (7)..(10): Xaa = Any Amino Acid
  misc_feature (14)..(15): Xaa can be any naturally occurring amino acid
CCEYCCXNPXACTXXGCY

SEQ ID NO: 1264 - protein, 18 aa, Artificial Sequence
  Synthetically generated peptide
  VARIANT (7)..(10): Xaa = Any Amino Acid
  misc_feature (14)..(14): Xaa can be any naturally occurring amino acid
  misc_feature (16)..(16): Xaa can be any naturally occurring amino acid
CCEYCCXNPXACTXGXCY

SEQ ID NO: 1265 - protein, 18 aa, Artificial Sequence
  Synthetically generated peptide
  VARIANT (7)..(10): Xaa = Any Amino Acid
  misc_feature (14)..(14): Xaa can be any naturally occurring amino acid
  misc_feature (17)..(17): Xaa can be any naturally occurring amino acid
CCEYCCXNPXACTXGCXY

SEQ ID NO: 1266 - protein, 17 aa, Artificial Sequence
  Synthetically generated peptide
  VARIANT (7)..(10): Xaa = Any Amino Acid
  misc_feature (15)..(15): Xaa can be any naturally occurring amino acid
CCEYCCXNPXACTGXCY

SEQ ID NO: 1267 - protein, 18 aa, Artificial Sequence
  Synthetically generated peptide
  VARIANT (7)..(10): Xaa = Any Amino Acid
  misc_feature (15)..(16): Xaa can be any naturally occurring amino acid
CCEYCCXNPXACTGXXCY

SEQ ID NO: 1268 - protein, 18 aa, Artificial Sequence
  Synthetically generated peptide
  VARIANT (7)..(10): Xaa = Any Amino Acid
  misc_feature (15)..(15): Xaa can be any naturally occurring amino acid
  misc_feature (17)..(17): Xaa can be any naturally occurring amino acid
CCEYCCXNPXACTGXCXY

SEQ ID NO: 1269 - protein, 17 aa, Artificial Sequence
  Synthetically generated peptide
  VARIANT (7)..(10): Xaa = Any Amino Acid
  misc_feature (16)..(16): Xaa can be any naturally occurring amino acid
CCEYCCXNPXACTGCXY

SEQ ID NO: 1270 - protein, 18 aa, Artificial Sequence
  Synthetically generated peptide
  VARIANT (7)..(10): Xaa = Any Amino Acid
  misc_feature (16)..(17): Xaa can be any naturally occurring amino acid
CCEYCCXNPXACTGCXXY

SEQ ID NO: 1271 - protein, 16 aa, Artificial Sequence
  Synthetically generated peptide
  VARIANT (1)..(16): Xaa = Any Amino Acid
  VARIANT (7)..(11): Xaa = Any Amino Acid
CCEYCCXNPAXCTGCY

SEQ ID NO: 1272 - protein, 17 aa, Artificial Sequence
  Synthetically generated peptide
  VARIANT (7)..(11): Xaa = Any Amino Acid
  misc_feature (12)..(12): Xaa can be any naturally occurring amino acid
CCEYCCXNPAXXCTGCY

SEQ ID NO: 1273 - protein, 18 aa, Artificial Sequence
  Synthetically generated peptide
  VARIANT (7)..(11): Xaa = Any Amino Acid
  misc_feature (12)..(13): Xaa can be any naturally occurring amino acid
CCEYCCXNPAXXXCTGCY

SEQ ID NO: 1274 - protein, 18 aa, Artificial Sequence
  Synthetically generated peptide
  VARIANT (7)..(11): Xaa = Any Amino Acid
  misc_feature (12)..(12): Xaa can be any naturally occurring amino acid
  misc_feature (14)..(14): Xaa can be any naturally occurring amino acid
CCEYCCXNPAXXCXTGCY

SEQ ID NO: 1275 - protein, 18 aa, Artificial Sequence
  Synthetically generated peptide
  VARIANT (1)..(18): Xaa = Any Amino Acid
CCEYCCXNPAXXCTXGCY

SEQ ID NO: 1276 - protein, 18 aa, Artificial Sequence
  Synthetically generated peptide
  VARIANT (7)..(11): Xaa = Any Amino Acid
  misc_feature (12)..(12): Xaa can be any naturally occurring amino acid
  misc_feature (16)..(16): Xaa can be any naturally occurring amino acid
CCEYCCXNPAXXCTGXCY

SEQ ID NO: 1277 - protein, 18 aa, Artificial Sequence
  Synthetically generated peptide
  VARIANT (7)..(11): Xaa = Any Amino Acid
  misc_feature (12)..(12): Xaa can be any naturally occurring amino acid
  misc_feature (17)..(17): Xaa can be any naturally occurring amino acid
CCEYCCXNPAXXCTGCXY

SEQ ID NO: 1278 - protein, 17 aa, Artificial Sequence
  Synthetically generated peptide
  VARIANT (7)..(11): Xaa = Any Amino Acid
  misc_feature (13)..(13): Xaa can be any naturally occurring amino acid
CCEYCCXNPAXCXTGCY

SEQ ID NO: 1279 - protein, 18 aa, Artificial Sequence
  Synthetically generated peptide
  VARIANT (7)..(11): Xaa = Any Amino Acid
  misc_feature (13)..(14): Xaa can be any naturally occurring amino acid
CCEYCCXNPAXCXXTGCY

SEQ ID NO: 1280 - protein, 18 aa, Artificial Sequence
  Synthetically generated peptide
  VARIANT (7)..(11): Xaa = Any Amino Acid
  misc_feature (13)..(13): Xaa can be any naturally occurring amino acid
  misc_feature (15)..(15): Xaa can be any naturally occurring amino acid
CCEYCCXNPAXCXTXGCY

SEQ ID NO: 1281 - protein, 18 aa, Artificial Sequence
  Synthetically generated peptide
  VARIANT (7)..(11): Xaa = Any Amino Acid
  misc_feature (13)..(13): Xaa can be any naturally occurring amino acid
  misc_feature (16)..(16): Xaa can be any naturally occurring amino acid
CCEYCCXNPAXCXTGXCY

SEQ ID NO: 1282 - protein, 18 aa, Artificial Sequence
  Synthetically generated peptide
  VARIANT (7)..(11): Xaa = Any Amino Acid
  misc_feature (13)..(13): Xaa can be any naturally occurring amino acid
  misc_feature (17)..(17): Xaa can be any naturally occurring amino acid
CCEYCCXNPAXCXTGCXY

SEQ ID NO: 1283 - protein, 17 aa, Artificial Sequence
  Synthetically generated peptide
  VARIANT (7)..(11): Xaa = Any Amino Acid
  misc_feature (14)..(14): Xaa can be any naturally occurring amino acid
CCEYCCXNPAXCTXGCY

SEQ ID NO: 1284 - protein, 18 aa, Artificial Sequence
  Synthetically generated peptide
  VARIANT (7)..(11): Xaa = Any Amino Acid
  misc_feature (14)..(15): Xaa can be any naturally occurring amino acid
CCEYCCXNPAXCTXXGCY

SEQ ID NO: 1285 - protein, 18 aa, Artificial Sequence
  Synthetically generated peptide
  VARIANT (7)..(11): Xaa = Any Amino Acid
  misc_feature (14)..(14): Xaa can be any naturally occurring amino acid
  misc_feature (16)..(16): Xaa can be any naturally occurring amino acid
CCEYCCXNPAXCTXGXCY

SEQ ID NO: 1286 - protein, 18 aa, Artificial Sequence
  Synthetically generated peptide
  VARIANT (7)..(11): Xaa = Any Amino Acid
  misc_feature (14)..(14): Xaa can be any naturally occurring amino acid
  misc_feature (17)..(17): Xaa can be any naturally occurring amino acid
CCEYCCXNPAXCTXGCXY

SEQ ID NO: 1287 - protein, 17 aa, Artificial Sequence
  Synthetically generated peptide
  VARIANT (7)..(11): Xaa = Any Amino Acid
  misc_feature (15)..(15): Xaa can be any naturally occurring amino acid
CCEYCCXNPAXCTGXCY

SEQ ID NO: 1288 - protein, 18 aa, Artificial Sequence
  Synthetically generated peptide
  VARIANT (7)..(11): Xaa = Any Amino Acid
  misc_feature (15)..(16): Xaa can be any naturally occurring amino acid
CCEYCCXNPAXCTGXXCY

SEQ ID NO: 1289 - protein, 18 aa, Artificial Sequence
  Synthetically generated peptide
  VARIANT (7)..(11): Xaa = Any Amino Acid
  misc_feature (15)..(15): Xaa can be any naturally occurring amino acid
  misc_feature (17)..(17): Xaa can be any naturally occurring amino acid
CCEYCCXNPAXCTGXCXY

SEQ ID NO: 1290 - protein, 17 aa, Artificial Sequence
  Synthetically generated peptide
  VARIANT (7)..(11): Xaa = Any Amino Acid
  misc_feature (16)..(16): Xaa can be any naturally occurring amino acid
CCEYCCXNPAXCTGCXY

SEQ ID NO: 1291 - protein, 18 aa, Artificial Sequence
  Synthetically generated peptide
  VARIANT (7)..(11): Xaa = Any Amino Acid
  misc_feature (16)..(17): Xaa can be any naturally occurring amino acid
CCEYCCXNPAXCTGCXXY

SEQ ID NO: 1292 - protein, 16 aa, Artificial Sequence
  Synthetically generated peptide
  VARIANT (7)..(12): Xaa = Any Amino Acid
CCEYCCXNPACXTGCY

SEQ ID NO: 1293 - protein, 17 aa, Artificial Sequence
  Synthetically generated peptide
  VARIANT (7)..(12): Xaa = Any Amino Acid
  misc_feature (13)..(13): Xaa can be any naturally occurring amino acid
CCEYCCXNPACXXTGCY

SEQ ID NO: 1294 - protein, 18 aa, Artificial Sequence
  Synthetically generated peptide
  VARIANT (7)..(12): Xaa = Any Amino Acid
  misc_feature (13)..(14): Xaa can be any naturally occurring amino acid
CCEYCCXNPACXXXTGCY

SEQ ID NO: 1295 - protein, 18 aa, Artificial Sequence
  Synthetically generated peptide
  VARIANT (7)..(12): Xaa = Any Amino Acid
  misc_feature (13)..(13): Xaa can be any naturally occurring amino acid
  misc_feature (15)..(15): Xaa can be any naturally occurring amino acid
CCEYCCXNPACXXTXGCY

SEQ ID NO: 1296 - protein, 18 aa, Artificial Sequence
  Synthetically generated peptide
  VARIANT (7)..(12): Xaa = Any Amino Acid
  misc_feature (13)..(13): Xaa can be any naturally occurring amino acid
  misc_feature (16)..(16): Xaa can be any naturally occurring amino acid
CCEYCCXNPACXXTGXCY

SEQ ID NO: 1297 - protein, 18 aa, Artificial Sequence
  Synthetically generated peptide
  VARIANT (7)..(12): Xaa = Any Amino Acid
  misc_feature (13)..(13): Xaa can be any naturally occurring amino acid
  misc_feature (17)..(17): Xaa can be any naturally occurring amino acid
CCEYCCXNPACXXTGCXY

SEQ ID NO: 1298 - protein, 17 aa, Artificial Sequence
  Synthetically generated peptide
  VARIANT (7)..(12): Xaa = Any Amino Acid
  misc_feature (14)..(14): Xaa can be any naturally occurring amino acid
CCEYCCXNPACXTXGCY

SEQ ID NO: 1299 - protein, 18 aa, Artificial Sequence
  Synthetically generated peptide
  VARIANT (7)..(12): Xaa = Any Amino Acid
  misc_feature (14)..(15): Xaa can be any naturally occurring amino acid
CCEYCCXNPACXTXXGCY

SEQ ID NO: 1300 - protein, 18 aa, Artificial Sequence
  Synthetically generated peptide
  VARIANT (7)..(12): Xaa = Any Amino Acid
  misc_feature (14)..(14): Xaa can be any naturally occurring amino acid
  misc_feature (16)..(16): Xaa can be any naturally occurring amino acid
CCEYCCXNPACXTXGXCY

SEQ ID NO: 1301 - protein, 18 aa, Artificial Sequence
  Synthetically generated peptide
  VARIANT (7)..(12): Xaa = Any Amino Acid
  misc_feature (14)..(14): Xaa can be any naturally occurring amino acid
  misc_feature (17)..(17): Xaa can be any naturally occurring amino acid
CCEYCCXNPACXTXGCXY

SEQ ID NO: 1302 - protein, 17 aa, Artificial Sequence
  Synthetically generated peptide
  VARIANT (7)..(12): Xaa = Any Amino Acid
  misc_feature (15)..(15): Xaa can be any naturally occurring amino acid
CCEYCCXNPACXTGXCY

SEQ ID NO: 1303 - protein, 18 aa, Artificial Sequence
  Synthetically generated peptide
  VARIANT (7)..(12): Xaa = Any Amino Acid
  misc_feature (15)..(16): Xaa can be any naturally occurring amino acid
CCEYCCXNPACXTGXXCY

SEQ ID NO: 1304 - protein, 18 aa, Artificial Sequence
  Synthetically generated peptide
  VARIANT (7)..(12): Xaa = Any Amino Acid
  misc_feature (15)..(15): Xaa can be any naturally occurring amino acid
  misc_feature (17)..(17): Xaa can be any naturally occurring amino acid
CCEYCCXNPACXTGXCXY

SEQ ID NO: 1305 - protein, 17 aa, Artificial Sequence
  Synthetically generated peptide
  VARIANT (7)..(12): Xaa = Any Amino Acid
  misc_feature (16)..(16): Xaa can be any naturally occurring amino acid
CCEYCCXNPACXTGCXY

SEQ ID NO: 1306 - protein, 18 aa, Artificial Sequence
  Synthetically generated peptide
  VARIANT (7)..(12): Xaa = Any Amino Acid
  misc_feature (16)..(17): Xaa can be any naturally occurring amino acid
CCEYCCXNPACXTGCXXY

SEQ ID NO: 1307 - protein, 16 aa, Artificial Sequence
  Synthetically generated peptide
  VARIANT (1)..(16): Xaa = Any Amino Acid
  VARIANT (7)..(13): Xaa = Any Amino Acid
CCEYCCXNPACTXGCY

SEQ ID NO: 1308 - protein, 17 aa, Artificial Sequence
  Synthetically generated peptide
  VARIANT (7)..(13): Xaa = Any Amino Acid
  misc_feature (14)..(14): Xaa can be any naturally occurring amino acid
CCEYCCXNPACTXXGCY

SEQ ID NO: 1309 - protein, 18 aa, Artificial Sequence
  Synthetically generated peptide
  VARIANT (7)..(13): Xaa = Any Amino Acid
  misc_feature (14)..(15): Xaa can be any naturally occurring amino acid
CCEYCCXNPACTXXXGCY

SEQ ID NO: 1310 - protein, 18 aa, Artificial Sequence
  Synthetically generated peptide
  VARIANT (7)..(13): Xaa = Any Amino Acid
  misc_feature (14)..(14): Xaa can be any naturally occurring amino acid
  misc_feature (16)..(16): Xaa can be any naturally occurring amino acid
CCEYCCXNPACTXXGXCY

SEQ ID NO: 1311 - protein, 18 aa, Artificial Sequence
  Synthetically generated peptide
  VARIANT (7)..(13): Xaa = Any Amino Acid
  misc_feature (14)..(14): Xaa can be any naturally occurring amino acid
  misc_feature (17)..(17): Xaa can be any naturally occurring amino acid
CCEYCCXNPACTXXGCXY

SEQ ID NO: 1312 - protein, 17 aa, Artificial Sequence
  Synthetically generated peptide
  VARIANT (7)..(13): Xaa = Any Amino Acid
  misc_feature (15)..(15): Xaa can be any naturally occurring amino acid
CCEYCCXNPACTXGXCY

SEQ ID NO: 1313 - protein, 18 aa, Artificial Sequence
  Synthetically generated peptide
  VARIANT (7)..(13): Xaa = Any Amino Acid
  misc_feature (15)..(16): Xaa can be any naturally occurring amino acid
CCEYCCXNPACTXGXXCY

SEQ ID NO: 1314 - protein, 18 aa, Artificial Sequence
  Synthetically generated peptide
  VARIANT (7)..(13): Xaa = Any Amino Acid
  misc_feature (15)..(15): Xaa can be any naturally occurring amino acid
  misc_feature (17)..(17): Xaa can be any naturally occurring amino acid
CCEYCCXNPACTXGXCXY

SEQ ID NO: 1315 - protein, 17 aa, Artificial Sequence
  Synthetically generated peptide
  VARIANT (7)..(13): Xaa = Any Amino Acid
  misc_feature (16)..(16): Xaa can be any naturally occurring amino acid
CCEYCCXNPACTXGCXY

SEQ ID NO: 1316 - protein, 18 aa, Artificial Sequence
  Synthetically generated peptide
  VARIANT (7)..(13): Xaa = Any Amino Acid
  misc_feature (16)..(17): Xaa can be any naturally occurring amino acid
CCEYCCXNPACTXGCXXY

SEQ ID NO: 1317 - protein, 16 aa, Artificial Sequence
  Synthetically generated peptide
  VARIANT (7)..(14): Xaa = Any Amino Acid
CCEYCCXNPACTGXCY

SEQ ID NO: 1318 - protein, 17 aa, Artificial Sequence
  Synthetically generated peptide
  VARIANT (7)..(14): Xaa = Any Amino Acid
  misc_feature (15)..(15): Xaa can be any naturally occurring amino acid
CCEYCCXNPACTGXXCY

SEQ ID NO: 1319 - protein, 18 aa, Artificial Sequence
  Synthetically generated peptide
  VARIANT (7)..(14): Xaa = Any Amino Acid
  misc_feature (15)..(16): Xaa can be any naturally occurring amino acid
CCEYCCXNPACTGXXXCY

SEQ ID NO: 1320 - protein, 18 aa, Artificial Sequence
  Synthetically generated peptide
  VARIANT (7)..(14): Xaa = Any Amino Acid
  misc_feature (15)..(15): Xaa can be any naturally occurring amino acid
  misc_feature (17)..(17): Xaa can be any naturally occurring amino acid
CCEYCCXNPACTGXXCXY

SEQ ID NO: 1321 - protein, 17 aa, Artificial Sequence
  Synthetically generated peptide
  VARIANT (7)..(14): Xaa = Any Amino Acid
  misc_feature (16)..(16): Xaa can be any naturally occurring amino acid
CCEYCCXNPACTGXCXY

SEQ ID NO: 1322 - protein, 18 aa, Artificial Sequence
  Synthetically generated peptide
  VARIANT (7)..(14): Xaa = Any Amino Acid
  misc_feature (16)..(17): Xaa can be any naturally occurring amino acid
CCEYCCXNPACTGXCXXY

SEQ ID NO: 1323 - protein, 16 aa, Artificial Sequence
  Synthetically generated peptide
  VARIANT (1)..(16): Xaa = Any Amino Acid
  VARIANT (7)..(15): Xaa = Any Amino Acid
CCEYCCXNPACTGCXY

SEQ ID NO: 1324 - protein, 17 aa, Artificial Sequence
  Synthetically generated peptide
  VARIANT (7)..(15): Xaa = Any Amino Acid
  misc_feature (16)..(16): Xaa can be any naturally occurring amino acid
CCEYCCXNPACTGCXXY

SEQ ID NO: 1325 - protein, 18 aa, Artificial Sequence
  Synthetically generated peptide
  VARIANT (7)..(15): Xaa = Any Amino Acid
  misc_feature (16)..(17): Xaa can be any naturally occurring amino acid
CCEYCCXNPACTGCXXXY

SEQ ID NO: 1326 - protein, 15 aa, Artificial Sequence
  Synthetically generated peptide
  VARIANT (8)..(8): Xaa = Any Amino Acid
CCEYCCNXPACTGCY

SEQ ID NO: 1327 - protein, 16 aa, Artificial Sequence
  Synthetically generated peptide
  VARIANT (8)..(9): Xaa = Any Amino Acid
CCEYCCNXXPACTGCY

SEQ ID NO: 1328 - protein, 17 aa, Artificial Sequence
  Synthetically generated peptide
  VARIANT (8)..(9): Xaa = Any Amino Acid
  misc_feature (10)..(10): Xaa can be any naturally occurring amino acid
CCEYCCNXXXPACTGCY

SEQ ID NO: 1329 - protein, 18 aa, Artificial Sequence
  Synthetically generated peptide
  VARIANT (8)..(9): Xaa = Any Amino Acid
  misc_feature (10)..(11): Xaa can be any naturally occurring amino acid
CCEYCCNXXXXPACTGCY

SEQ ID NO: 1330 - protein, 18 aa, Artificial Sequence
  Synthetically generated peptide
  VARIANT (8)..(9): Xaa = Any Amino Acid
  misc_feature (10)..(10): Xaa can be any naturally occurring amino acid
  misc_feature (12)..(12): Xaa can be any naturally occurring amino acid
CCEYCCNXXXPXACTGCY

SEQ ID NO: 1331 - protein, 18 aa, Artificial Sequence
  Synthetically generated peptide
  VARIANT (8)..(9): Xaa = Any Amino Acid
  misc_feature (10)..(10): Xaa can be any naturally occurring amino acid
  misc_feature (13)..(13): Xaa can be any naturally occurring amino acid
CCEYCCNXXXPAXCTGCY

SEQ ID NO: 1332 - protein, 18 aa, Artificial Sequence
  Synthetically generated peptide
  VARIANT (8)..(9): Xaa = Any Amino Acid
  misc_feature (10)..(10): Xaa can be any naturally occurring amino acid
  misc_feature (14)..(14): Xaa can be any naturally occurring amino acid
CCEYCCNXXXPACXTGCY

SEQ ID NO: 1333 - protein, 18 aa, Artificial Sequence
  Synthetically generated peptide
  VARIANT (8)..(9): Xaa = Any Amino Acid
  misc_feature (10)..(10): Xaa can be any naturally occurring amino acid
  misc_feature (15)..(15): Xaa can be any naturally occurring amino acid
CCEYCCNXXXPACTXGCY

SEQ ID NO: 1334 - protein, 18 aa, Artificial Sequence
  Synthetically generated peptide
  VARIANT (8)..(9): Xaa = Any Amino Acid
  misc_feature (10)..(10): Xaa can be any naturally occurring amino acid
  misc_feature (16)..(16): Xaa can be any naturally occurring amino acid
CCEYCCNXXXPACTGXCY

SEQ ID NO: 1335 - protein, 18 aa, Artificial Sequence
  Synthetically generated peptide
  VARIANT (8)..(9): Xaa = Any Amino Acid
  misc_feature (10)..(10): Xaa can be any naturally occurring amino acid
  misc_feature (17)..(17): Xaa can be any naturally occurring amino acid
CCEYCCNXXXPACTGCXY

SEQ ID NO: 1336 - protein, 17 aa, Artificial Sequence
  Synthetically generated peptide
  VARIANT (8)..(9): Xaa = Any Amino Acid
  misc_feature (11)..(11): Xaa can be any naturally occurring amino acid
CCEYCCNXXPXACTGCY

SEQ ID NO: 1337 - protein, 18 aa, Artificial Sequence
  Synthetically generated peptide
  VARIANT (8)..(9): Xaa = Any Amino Acid
  misc_feature (11)..(12): Xaa can be any naturally occurring amino acid
CCEYCCNXXPXXACTGCY

SEQ ID NO: 1338 - protein, 18 aa, Artificial Sequence
  Synthetically generated peptide
  VARIANT (8)..(9): Xaa = Any Amino Acid
  misc_feature (11)..(11): Xaa can be any naturally occurring amino acid
  misc_feature (13)..(13): Xaa can be any naturally occurring amino acid
CCEYCCNXXPXAXCTGCY

SEQ ID NO: 1339 - protein, 18 aa, Artificial Sequence
  Synthetically generated peptide
  VARIANT (8)..(9): Xaa = Any Amino Acid
  misc_feature (11)..(11): Xaa can be any naturally occurring amino acid
  misc_feature (14)..(14): Xaa can be any naturally occurring amino acid
CCEYCCNXXPXACXTGCY

SEQ ID NO: 1340 - protein, 18 aa, Artificial Sequence
  Synthetically generated peptide
  VARIANT (8)..(9): Xaa = Any Amino Acid
  misc_feature (11)..(11): Xaa can be any naturally occurring amino acid
  misc_feature (15)..(15): Xaa can be any naturally occurring amino acid
CCEYCCNXXPXACTXGCY

SEQ ID NO: 1341 - protein, 18 aa, Artificial Sequence
  Synthetically generated peptide
  VARIANT (8)..(9): Xaa = Any Amino Acid
  misc_feature (11)..(11): Xaa can be any naturally occurring amino acid
  misc_feature (16)..(16): Xaa can be any naturally occurring amino acid
CCEYCCNXXPXACTGXCY

SEQ ID NO: 1342 - protein, 18 aa, Artificial Sequence
  Synthetically generated peptide
  VARIANT (8)..(9): Xaa = Any Amino Acid
  misc_feature (11)..(11): Xaa can be any naturally occurring amino acid
  misc_feature (17)..(17): Xaa can be any naturally occurring amino acid
CCEYCCNXXPXACTGCXY

SEQ ID NO: 1343 - protein, 17 aa, Artificial Sequence
  Synthetically generated peptide
  VARIANT (8)..(9): Xaa = Any Amino Acid
  misc_feature (12)..(12): Xaa can be any naturally occurring amino acid
CCEYCCNXXPAXCTGCY

SEQ ID NO: 1344 - protein, 18 aa, Artificial Sequence
  Synthetically generated peptide
  VARIANT (8)..(9): Xaa = Any Amino Acid
  misc_feature (12)..(13): Xaa can be any naturally occurring amino acid
CCEYCCNXXPAXXCTGCY

SEQ ID NO: 1345 - protein, 18 aa, Artificial Sequence
  Synthetically generated peptide
  VARIANT (8)..(9): Xaa = Any Amino Acid
  misc_feature (12)..(12): Xaa can be any naturally occurring amino acid
  misc_feature (14)..(14): Xaa can be any naturally occurring amino acid
CCEYCCNXXPAXCXTGCY

SEQ ID NO: 1346 - protein, 18 aa, Artificial Sequence
  Synthetically generated peptide
  VARIANT (8)..(9): Xaa = Any Amino Acid
  misc_feature (12)..(12): Xaa can be any naturally occurring amino acid
  misc_feature (15)..(15): Xaa can be any naturally occurring amino acid
CCEYCCNXXPAXCTXGCY

SEQ ID NO: 1347 - protein, 18 aa, Artificial Sequence
  Synthetically generated peptide
  VARIANT (8)..(9): Xaa = Any Amino Acid
  misc_feature (12)..(12): Xaa can be any naturally occurring amino acid
  misc_feature (16)..(16): Xaa can be any naturally occurring amino acid
CCEYCCNXXPAXCTGXCY

SEQ ID NO: 1348 - protein, 18 aa, Artificial Sequence
  Synthetically generated peptide
  VARIANT (8)..(9): Xaa = Any Amino Acid
  misc_feature (12)..(12): Xaa can be any naturally occurring amino acid
  misc_feature (17)..(17): Xaa can be any naturally occurring amino acid
CCEYCCNXXPAXCTGCXY

SEQ ID NO: 1349 - protein, 17 aa, Artificial Sequence
  Synthetically generated peptide
  VARIANT (8)..(9): Xaa = Any Amino Acid
  misc_feature (13)..(13): Xaa can be any naturally occurring amino acid
CCEYCCNXXPACXTGCY

SEQ ID NO: 1350 - protein, 18 aa, Artificial Sequence
  Synthetically generated peptide
  VARIANT (8)..(9): Xaa = Any Amino Acid
  misc_feature (13)..(14): Xaa can be any naturally occurring amino acid
CCEYCCNXXPACXXTGCY

SEQ ID NO: 1351 - protein, 18 aa, Artificial Sequence
  Synthetically generated peptide
  VARIANT (8)..(9): Xaa = Any Amino Acid
  misc_feature (13)..(13): Xaa can be any naturally occurring amino acid
  misc_feature (15)..(15): Xaa can be any naturally occurring amino acid
CCEYCCNXXPACXTXGCY

SEQ ID NO: 1352 - protein, 18 aa, Artificial Sequence
  Synthetically generated peptide
  VARIANT (8)..(9): Xaa = Any Amino Acid
  misc_feature (13)..(13): Xaa can be any naturally occurring amino acid
  misc_feature (16)..(16): Xaa can be any naturally occurring amino acid
CCEYCCNXXPACXTGXCY

SEQ ID NO: 1353 - protein, 18 aa, Artificial Sequence
  Synthetically generated peptide
  VARIANT (8)..(9): Xaa = Any Amino Acid
  misc_feature (13)..(13): Xaa can be any naturally occurring amino acid
  misc_feature (17)..(17): Xaa can be any naturally occurring amino acid
CCEYCCNXXPACXTGCXY

SEQ ID NO: 1354 - protein, 17 aa, Artificial Sequence
  Synthetically generated peptide
  VARIANT (8)..(9): Xaa = Any Amino Acid
  misc_feature (14)..(14): Xaa can be any naturally occurring amino acid
CCEYCCNXXPACTXGCY

SEQ ID NO: 1355 - protein, 18 aa, Artificial Sequence
  Synthetically generated peptide
  VARIANT (8)..(9): Xaa = Any Amino Acid
  misc_feature (14)..(15): Xaa can be any naturally occurring amino acid
CCEYCCNXXPACTXXGCY

SEQ ID NO: 1356 - protein, 18 aa, Artificial Sequence
  Synthetically generated peptide
  VARIANT (8)..(9): Xaa = Any Amino Acid
  misc_feature (14)..(14): Xaa can be any naturally occurring amino acid
  misc_feature (16)..(16): Xaa can be any naturally occurring amino acid
CCEYCCNXXPACTXGXCY

SEQ ID NO: 1357 - protein, 18 aa, Artificial Sequence
  Synthetically generated peptide
  VARIANT (8)..(9): Xaa = Any Amino Acid
  misc_feature (14)..(14): Xaa can be any naturally occurring amino acid
  misc_feature (17)..(17): Xaa can be any naturally occurring amino acid
CCEYCCNXXPACTXGCXY

SEQ ID NO: 1358 - protein, 17 aa, Artificial Sequence
  Synthetically generated peptide
  VARIANT (8)..(9): Xaa = Any Amino Acid
  misc_feature (15)..(15): Xaa can be any naturally occurring amino acid
CCEYCCNXXPACTGXCY

SEQ ID NO: 1359 - protein, 18 aa, Artificial Sequence
  Synthetically generated peptide
  VARIANT (8)..(9): Xaa = Any Amino Acid
  misc_feature (15)..(16): Xaa can be any naturally occurring amino acid
CCEYCCNXXPACTGXXCY

SEQ ID NO: 1360 - protein, 18 aa, Artificial Sequence
  Synthetically generated peptide
  VARIANT (8)..(9): Xaa = Any Amino Acid
  misc_feature (15)..(15): Xaa can be any naturally occurring amino acid
  misc_feature (17)..(17): Xaa can be any naturally occurring amino acid
CCEYCCNXXPACTGXCXY

SEQ ID NO: 1361 - protein, 17 aa, Artificial Sequence
  Synthetically generated peptide
  VARIANT (8)..(9): Xaa = Any Amino Acid
  misc_feature (16)..(16): Xaa can be any naturally occurring amino acid
CCEYCCNXXPACTGCXY

SEQ ID NO: 1362 - protein, 18 aa, Artificial Sequence
  Synthetically generated peptide
  VARIANT (8)..(9): Xaa = Any Amino Acid
  misc_feature (16)..(17): Xaa can be any naturally occurring amino acid
CCEYCCNXXPACTGCXXY

SEQ ID NO: 1363 - protein, 16 aa, Artificial Sequence
  Synthetically generated peptide
  VARIANT (8)..(10): Xaa = Any Amino Acid
CCEYCCNXPXACTGCY

SEQ ID NO: 1364 - protein, 17 aa, Artificial Sequence
  Synthetically generated peptide
  VARIANT (8)..(10): Xaa = Any Amino Acid
  misc_feature (11)..(11): Xaa can be any naturally occurring amino acid
CCEYCCNXPXXACTGCY

SEQ ID NO: 1365 - protein, 18 aa, Artificial Sequence
  Synthetically generated peptide
  VARIANT (8)..(10): Xaa = Any Amino Acid
  misc_feature (11)..(12): Xaa can be any naturally occurring amino acid
CCEYCCNXPXXXACTGCY

SEQ ID NO: 1366 - protein, 18 aa, Artificial Sequence
  Synthetically generated peptide
  VARIANT (8)..(10): Xaa = Any Amino Acid
  misc_feature (11)..(11): Xaa can be any naturally occurring amino acid
  misc_feature (13)..(13): Xaa can be any naturally occurring amino acid
CCEYCCNXPXXAXCTGCY

SEQ ID NO: 1367 - protein, 18 aa, Artificial Sequence
  Synthetically generated peptide
  VARIANT (8)..(10): Xaa = Any Amino Acid
  misc_feature (11)..(11): Xaa can be any naturally occurring amino acid
  misc_feature (14)..(14): Xaa can be any naturally occurring amino acid
CCEYCCNXPXXACXTGCY

SEQ ID NO: 1368 - protein, 18 aa, Artificial Sequence
  Synthetically generated peptide
  VARIANT (8)..(10): Xaa = Any Amino Acid
  misc_feature (11)..(11): Xaa can be any naturally occurring amino acid
  misc_feature (15)..(15): Xaa can be any naturally occurring amino acid
CCEYCCNXPXXACTXGCY

SEQ ID NO: 1369 - protein, 18 aa, Artificial Sequence
  Synthetically generated peptide
  VARIANT (8)..(10): Xaa = Any Amino Acid
  misc_feature (11)..(11): Xaa can be any naturally occurring amino acid
  misc_feature (16)..(16): Xaa can be any naturally occurring amino acid
CCEYCCNXPXXACTGXCY

SEQ ID NO: 1370 - protein, 18 aa, Artificial Sequence
  Synthetically generated peptide
  VARIANT (8)..(10): Xaa = Any Amino Acid
  misc_feature (11)..(11): Xaa can be any naturally occurring amino acid
  misc_feature (17)..(17): Xaa can be any naturally occurring amino acid
CCEYCCNXPXXACTGCXY

SEQ ID NO: 1371 - protein, 17 aa, Artificial Sequence
  Synthetically generated peptide
  VARIANT (8)..(10): Xaa = Any Amino Acid
  misc_feature (12)..(12): Xaa can be any naturally occurring amino acid
CCEYCCNXPXAXCTGCY

SEQ ID NO: 1372 - protein, 18 aa, Artificial Sequence
  Synthetically generated peptide
  VARIANT (8)..(10): Xaa = Any Amino Acid
  misc_feature (12)..(13): Xaa can be any naturally occurring amino acid
CCEYCCNXPXAXXCTGCY

SEQ ID NO: 1373 - protein, 18 aa, Artificial Sequence
  Synthetically generated peptide
  VARIANT (8)..(10): Xaa = Any Amino Acid
  misc_feature (12)..(12): Xaa can be any naturally occurring amino acid
  misc_feature (14)..(14): Xaa can be any naturally occurring amino acid
CCEYCCNXPXAXCXTGCY

SEQ ID NO: 1374 - protein, 18 aa, Artificial Sequence
  Synthetically generated peptide
  VARIANT (8)..(10): Xaa = Any Amino Acid
  misc_feature (12)..(12): Xaa can be any naturally occurring amino acid
  misc_feature (15)..(15): Xaa can be any naturally occurring amino acid
CCEYCCNXPXAXCTXGCY

SEQ ID NO: 1375 - protein, 18 aa, Artificial Sequence
  Synthetically generated peptide
  VARIANT (8)..(10): Xaa = Any Amino Acid
  misc_feature (12)..(12): Xaa can be any naturally occurring amino acid
  misc_feature (16)..(16): Xaa can be any naturally occurring amino acid
CCEYCCNXPXAXCTGXCY

SEQ ID NO: 1376 - protein, 18 aa, Artificial Sequence
  Synthetically generated peptide
  VARIANT (8)..(10): Xaa = Any Amino Acid
  misc_feature (12)..(12): Xaa can be any naturally occurring amino acid
  misc_feature (17)..(17): Xaa can be any naturally occurring amino acid
CCEYCCNXPXAXCTGCXY

SEQ ID NO: 1377 - protein, 17 aa, Artificial Sequence
  Synthetically generated peptide
  VARIANT (8)..(10): Xaa = Any Amino Acid
  misc_feature (13)..(13): Xaa can be any naturally occurring amino acid
CCEYCCNXPXACXTGCY

SEQ ID NO: 1378 - protein, 18 aa, Artificial Sequence
  Synthetically generated peptide
  VARIANT (8)..(10): Xaa = Any Amino Acid
  misc_feature (13)..(14): Xaa can be any naturally occurring amino acid
CCEYCCNXPXACXXTGCY

SEQ ID NO: 1379 - protein, 18 aa, Artificial Sequence
  Synthetically generated peptide
  VARIANT (8)..(10): Xaa = Any Amino Acid
  misc_feature (13)..(13): Xaa can be any naturally occurring amino acid
  misc_feature (15)..(15): Xaa can be any naturally occurring amino acid
CCEYCCNXPXACXTXGCY

SEQ ID NO: 1380 - protein, 18 aa, Artificial Sequence
  Synthetically generated peptide
  VARIANT (8)..(10): Xaa = Any Amino Acid
  misc_feature (13)..(13): Xaa can be any naturally occurring amino acid
  misc_feature (16)..(16): Xaa can be any naturally occurring amino acid
CCEYCCNXPXACXTGXCY

SEQ ID NO: 1381 - protein, 18 aa, Artificial Sequence
  Synthetically generated peptide
  VARIANT (8)..(10): Xaa = Any Amino Acid
  misc_feature (13)..(13): Xaa can be any naturally occurring amino acid
  misc_feature (17)..(17): Xaa can be any naturally occurring amino acid
CCEYCCNXPXACXTGCXY

SEQ ID NO: 1382 - protein, 17 aa, Artificial Sequence
  Synthetically generated peptide
  VARIANT (8)..(10): Xaa = Any Amino Acid
  misc_feature (14)..(14): Xaa can be any naturally occurring amino acid
CCEYCCNXPXACTXGCY

SEQ ID NO: 1383 - protein, 18 aa, Artificial Sequence
  Synthetically generated peptide
  VARIANT (8)..(10): Xaa = Any Amino Acid
  misc_feature (14)..(15): Xaa can be any naturally occurring amino acid
CCEYCCNXPXACTXXGCY

SEQ ID NO: 1384 - protein, 18 aa, Artificial Sequence
  Synthetically generated peptide
  VARIANT (8)..(10): Xaa = Any Amino Acid
  misc_feature (14)..(14): Xaa can be any naturally occurring amino acid
  misc_feature (16)..(16): Xaa can be any naturally occurring amino acid
CCEYCCNXPXACTXGXCY

SEQ ID NO: 1385 - protein, 18 aa, Artificial Sequence
  Synthetically generated peptide
  VARIANT (8)..(10): Xaa = Any Amino Acid
  misc_feature (14)..(14): Xaa can be any naturally occurring amino acid
  misc_feature (17)..(17): Xaa can be any naturally occurring amino acid
CCEYCCNXPXACTXGCXY

SEQ ID NO: 1386 - protein, 17 aa, Artificial Sequence
  Synthetically generated peptide
  VARIANT (8)..(10): Xaa = Any Amino Acid
  misc_feature (15)..(15): Xaa can be any naturally occurring amino acid
CCEYCCNXPXACTGXCY

SEQ ID NO: 1387 - protein, 18 aa, Artificial Sequence
  Synthetically generated peptide
  VARIANT (8)..(10): Xaa = Any Amino Acid
  misc_feature (15)..(16): Xaa can be any naturally occurring amino acid
CCEYCCNXPXACTGXXCY

SEQ ID NO: 1388 - protein, 18 aa, Artificial Sequence
  Synthetically generated peptide
  VARIANT (8)..(10): Xaa = Any Amino Acid
  misc_feature (15)..(15): Xaa can be any naturally occurring amino acid
  misc_feature (17)..(17): Xaa can be any naturally occurring amino acid
CCEYCCNXPXACTGXCXY

SEQ ID NO: 1389 - protein, 17 aa, Artificial Sequence
  Synthetically generated peptide
  VARIANT (8)..(10): Xaa = Any Amino Acid
  misc_feature (16)..(16): Xaa can be any naturally occurring amino acid
CCEYCCNXPXACTGCXY

SEQ ID NO: 1390 - protein, 18 aa, Artificial Sequence
  Synthetically generated peptide
  VARIANT (8)..(10): Xaa = Any Amino Acid
  misc_feature (16)..(17): Xaa can be any naturally occurring amino acid
CCEYCCNXPXACTGCXXY

SEQ ID NO: 1391 - protein, 16 aa, Artificial Sequence
  Synthetically generated peptide
  VARIANT (8)..(11): Xaa = Any Amino Acid
CCEYCCNXPAXCTGCY

SEQ ID NO: 1392 - protein, 17 aa, Artificial Sequence
  Synthetically generated peptide
  VARIANT (8)..(11): Xaa = Any Amino Acid
  misc_feature (12)..(12): Xaa can be any naturally occurring amino acid
CCEYCCNXPAXXCTGCY

SEQ ID NO: 1393 - protein, 18 aa, Artificial Sequence
  Synthetically generated peptide
  VARIANT (8)..(11): Xaa = Any Amino Acid
  misc_feature (12)..(13): Xaa can be any naturally occurring amino acid
CCEYCCNXPAXXXCTGCY

SEQ ID NO: 1394 - protein, 18 aa, Artificial Sequence
  Synthetically generated peptide
  VARIANT (8)..(11): Xaa = Any Amino Acid
  misc_feature (12)..(12): Xaa can be any naturally occurring amino acid
  misc_feature (14)..(14): Xaa can be any naturally occurring amino acid
CCEYCCNXPAXXCXTGCY

SEQ ID NO: 1395 - protein, 18 aa, Artificial Sequence
  Synthetically generated peptide
  VARIANT (8)..(11): Xaa = Any Amino Acid
  misc_feature (12)..(12): Xaa can be any naturally occurring amino acid
  misc_feature (15)..(15): Xaa can be any naturally occurring amino acid
CCEYCCNXPAXXCTXGCY

SEQ ID NO: 1396 - protein, 18 aa, Artificial Sequence
  Synthetically generated peptide
  VARIANT (8)..(11): Xaa = Any Amino Acid
  misc_feature (12)..(12): Xaa can be any naturally occurring amino acid
  misc_feature (16)..(16): Xaa can be any naturally occurring amino acid
CCEYCCNXPAXXCTGXCY

SEQ ID NO: 1397 - protein, 18 aa, Artificial Sequence
  Synthetically generated peptide
  VARIANT (8)..(11): Xaa = Any Amino Acid
  misc_feature (12)..(12): Xaa can be any naturally occurring amino acid
  misc_feature (17)..(17): Xaa can be any naturally occurring amino acid
CCEYCCNXPAXXCTGCXY

SEQ ID NO: 1398 - protein, 17 aa, Artificial Sequence
  Synthetically generated peptide
  VARIANT (8)..(11): Xaa = Any Amino Acid
  misc_feature (13)..(13): Xaa can be any naturally occurring amino acid
CCEYCCNXPAXCXTGCY

SEQ ID NO: 1399 - protein, 18 aa, Artificial Sequence
  Synthetically generated peptide
  VARIANT (8)..(11): Xaa = Any Amino Acid
  misc_feature (13)..(14): Xaa can be any naturally occurring amino acid
CCEYCCNXPAXCXXTGCY

SEQ ID NO: 1400 - protein, 18 aa, Artificial Sequence
  Synthetically generated peptide
  VARIANT (8)..(11): Xaa = Any Amino Acid
  misc_feature (13)..(13): Xaa can be any naturally occurring amino acid
  misc_feature (15)..(15): Xaa can be any naturally occurring amino acid
CCEYCCNXPAXCXTXGCY

SEQ ID NO: 1401 - protein, 18 aa, Artificial Sequence
  Synthetically generated peptide
  VARIANT (8)..(11): Xaa = Any Amino Acid
  misc_feature (13)..(13): Xaa can be any naturally occurring amino acid
  misc_feature (16)..(16): Xaa can be any naturally occurring amino acid
CCEYCCNXPAXCXTGXCY

SEQ ID NO: 1402 - protein, 18 aa, Artificial Sequence
  Synthetically generated peptide
  VARIANT (8)..(11): Xaa = Any Amino Acid
  misc_feature (13)..(13): Xaa can be any naturally occurring amino acid
  misc_feature (17)..(17): Xaa can be any naturally occurring amino acid
CCEYCCNXPAXCXTGCXY

SEQ ID NO: 1403 - protein, 17 aa, Artificial Sequence
  Synthetically generated peptide
  VARIANT (8)..(11): Xaa = Any Amino Acid
  misc_feature (14)..(14): Xaa can be any naturally occurring amino acid
CCEYCCNXPAXCTXGCY

SEQ ID NO: 1404 - protein, 18 aa, Artificial Sequence
  Synthetically generated peptide
  VARIANT (8)..(11): Xaa = Any Amino Acid
  misc_feature (14)..(15): Xaa can be any naturally occurring amino acid
CCEYCCNXPAXCTXXGCY

SEQ ID NO: 1405 - protein, 18 aa, Artificial Sequence
  Synthetically generated peptide
  VARIANT (8)..(11): Xaa = Any Amino Acid
  misc_feature (14)..(14): Xaa can be any naturally occurring amino acid
  misc_feature (16)..(16): Xaa can be any naturally occurring amino acid
CCEYCCNXPAXCTXGXCY

SEQ ID NO: 1406 - protein, 18 aa, Artificial Sequence
  Synthetically generated peptide
  VARIANT (8)..(11): Xaa = Any Amino Acid
  misc_feature (14)..(14): Xaa can be any naturally occurring amino acid
  misc_feature (17)..(17): Xaa can be any naturally occurring amino acid
CCEYCCNXPAXCTXGCXY

SEQ ID NO: 1407 - protein, 17 aa, Artificial Sequence
  Synthetically generated peptide
  VARIANT (8)..(11): Xaa = Any Amino Acid
  misc_feature (15)..(15): Xaa can be any naturally occurring amino acid
CCEYCCNXPAXCTGXCY

SEQ ID NO: 1408 - protein, 18 aa, Artificial Sequence
  Synthetically generated peptide
  VARIANT (8)..(11): Xaa = Any Amino Acid
  misc_feature (15)..(16): Xaa can be any naturally occurring amino acid
CCEYCCNXPAXCTGXXCY

SEQ ID NO: 1409 - protein, 18 aa, Artificial Sequence
  Synthetically generated peptide
  VARIANT (8)..(11): Xaa = Any Amino Acid
  misc_feature (15)..(15): Xaa can be any naturally occurring amino acid
  misc_feature (17)..(17): Xaa can be any naturally occurring amino acid
CCEYCCNXPAXCTGXCXY

SEQ ID NO: 1410 - protein, 17 aa, Artificial Sequence
  Synthetically generated peptide
  VARIANT (8)..(11): Xaa = Any Amino Acid
  misc_feature (16)..(16): Xaa can be any naturally occurring amino acid
CCEYCCNXPAXCTGCXY

SEQ ID NO: 1411 - protein, 18 aa, Artificial Sequence
  Synthetically generated peptide
  VARIANT (8)..(11): Xaa = Any Amino Acid
  misc_feature (16)..(17): Xaa can be any naturally occurring amino acid
CCEYCCNXPAXCTGCXXY

SEQ ID NO: 1412 - protein, 16 aa, Artificial Sequence
  Synthetically generated peptide
  VARIANT (8)..(12): Xaa = Any Amino Acid
CCEYCCNXPACXTGCY

SEQ ID NO: 1413 - protein, 17 aa, Artificial Sequence
  Synthetically generated peptide
  VARIANT (8)..(12): Xaa = Any Amino Acid
  misc_feature (13)..(13): Xaa can be any naturally occurring amino acid
CCEYCCNXPACXXTGCY

SEQ ID NO: 1414 - protein, 18 aa, Artificial Sequence
  Synthetically generated peptide
  VARIANT (8)..(12): Xaa = Any Amino Acid
  misc_feature (13)..(14): Xaa can be any naturally occurring amino acid
CCEYCCNXPACXXXTGCY

SEQ ID NO: 1415 - protein, 18 aa, Artificial Sequence
  Synthetically generated peptide
  VARIANT (8)..(12): Xaa = Any Amino Acid
  misc_feature (13)..(13): Xaa can be any naturally occurring amino acid
  misc_feature (15)..(15): Xaa can be any naturally occurring amino acid
CCEYCCNXPACXXTXGCY

SEQ ID NO: 1416 - protein, 18 aa, Artificial Sequence
  Synthetically generated peptide
  VARIANT (8)..(12): Xaa = Any Amino Acid
  misc_feature (13)..(13): Xaa can be any naturally occurring amino acid
  misc_feature (16)..(16): Xaa can be any naturally occurring amino acid
CCEYCCNXPACXXTGXCY

SEQ ID NO: 1417 - protein, 18 aa, Artificial Sequence
  Synthetically generated peptide
  VARIANT (8)..(12): Xaa = Any Amino Acid
  misc_feature (13)..(13): Xaa can be any naturally occurring amino acid
  misc_feature (17)..(17): Xaa can be any naturally occurring amino acid
CCEYCCNXPACXXTGCXY

SEQ ID NO: 1418 - protein, 17 aa, Artificial Sequence
  Synthetically generated peptide
  VARIANT (8)..(12): Xaa = Any Amino Acid
  misc_feature (14)..(14): Xaa can be any naturally occurring amino acid
CCEYCCNXPACXTXGCY

SEQ ID NO: 1419 - protein, 18 aa, Artificial Sequence
  Synthetically generated peptide
  VARIANT (8)..(12): Xaa = Any Amino Acid
  misc_feature (14)..(15): Xaa can be any naturally occurring amino acid
CCEYCCNXPACXTXXGCY

SEQ ID NO: 1420 - protein, 18 aa, Artificial Sequence
  Synthetically generated peptide
  VARIANT (8)..(12): Xaa = Any Amino Acid
  misc_feature (14)..(14): Xaa can be any naturally occurring amino acid
  misc_feature (16)..(16): Xaa can be any naturally occurring amino acid
CCEYCCNXPACXTXGXCY

SEQ ID NO: 1421 - protein, 18 aa, Artificial Sequence
  Synthetically generated peptide
  VARIANT (8)..(12): Xaa = Any Amino Acid
  misc_feature (14)..(14): Xaa can be any naturally occurring amino acid
  misc_feature (17)..(17): Xaa can be any naturally occurring amino acid
CCEYCCNXPACXTXGCXY

SEQ ID NO: 1422 - protein, 17 aa, Artificial Sequence
  Synthetically generated peptide
  VARIANT (8)..(12): Xaa = Any Amino Acid
  misc_feature (15)..(15): Xaa can be any naturally occurring amino acid
CCEYCCNXPACXTGXCY

SEQ ID NO: 1423 - protein, 18 aa, Artificial Sequence
  Synthetically generated peptide
  VARIANT (8)..(12): Xaa = Any Amino Acid
  misc_feature (15)..(16): Xaa can be any naturally occurring amino acid
CCEYCCNXPACXTGXXCY

SEQ ID NO: 1424 - protein, 18 aa, Artificial Sequence
  Synthetically generated peptide
  VARIANT (8)..(12): Xaa = Any Amino Acid
  misc_feature (15)..(15): Xaa can be any naturally occurring amino acid
  misc_feature (17)..(17): Xaa can be any naturally occurring amino acid
CCEYCCNXPACXTGXCXY

SEQ ID NO: 1425 - protein, 17 aa, Artificial Sequence
  Synthetically generated peptide
  VARIANT (8)..(12): Xaa = Any Amino Acid
  misc_feature (16)..(16): Xaa can be any naturally occurring amino acid
CCEYCCNXPACXTGCXY

SEQ ID NO: 1426 - protein, 18 aa, Artificial Sequence
  Synthetically generated peptide
  VARIANT (8)..(12): Xaa = Any Amino Acid
  misc_feature (16)..(17): Xaa can be any naturally occurring amino acid
CCEYCCNXPACXTGCXXY

SEQ ID NO: 1427 - protein, 16 aa, Artificial Sequence
  Synthetically generated peptide
  VARIANT (8)..(13): Xaa = Any Amino Acid
CCEYCCNXPACTXGCY

SEQ ID NO: 1428 - protein, 17 aa, Artificial Sequence
  Synthetically generated peptide
  VARIANT (8)..(13): Xaa = Any Amino Acid
  misc_feature (14)..(14): Xaa can be any naturally occurring amino acid
CCEYCCNXPACTXXGCY

SEQ ID NO: 1429 - protein, 18 aa, Artificial Sequence
  Synthetically generated peptide
  VARIANT (8)..(13): Xaa = Any Amino Acid
  misc_feature (14)..(15): Xaa can be any naturally occurring amino acid
CCEYCCNXPACTXXXGCY

SEQ ID NO: 1430 - protein, 18 aa, Artificial Sequence
  Synthetically generated peptide
  VARIANT (8)..(13): Xaa = Any Amino Acid
  misc_feature (14)..(14): Xaa can be any naturally occurring amino acid
  misc_feature (16)..(16): Xaa can be any naturally occurring amino acid
CCEYCCNXPACTXXGXCY

SEQ ID NO: 1431 - protein, 18 aa, Artificial Sequence
  Synthetically generated peptide
  VARIANT (8)..(13): Xaa = Any Amino Acid
  misc_feature (14)..(14): Xaa can be any naturally occurring amino acid
  misc_feature (17)..(17): Xaa can be any naturally occurring amino acid
CCEYCCNXPACTXXGCXY

SEQ ID NO: 1432 - protein, 17 aa, Artificial Sequence
  Synthetically generated peptide
  VARIANT (8)..(13): Xaa = Any Amino Acid
  misc_feature (15)..(15): Xaa can be any naturally occurring amino acid
CCEYCCNXPACTXGXCY

SEQ ID NO: 1433 - protein, 18 aa, Artificial Sequence
  Synthetically generated peptide
  VARIANT (8)..(13): Xaa = Any Amino Acid
  misc_feature (15)..(16): Xaa can be any naturally occurring amino acid
CCEYCCNXPACTXGXXCY

SEQ ID NO: 1434 - protein, 18 aa, Artificial Sequence
  Synthetically generated peptide
  VARIANT (8)..(13): Xaa = Any Amino Acid
  misc_feature (15)..(15): Xaa can be any naturally occurring amino acid
  misc_feature (17)..(17): Xaa can be any naturally occurring amino acid
CCEYCCNXPACTXGXCXY

SEQ ID NO: 1435 - protein, 17 aa, Artificial Sequence
  Synthetically generated peptide
  VARIANT (8)..(13): Xaa = Any Amino Acid
  misc_feature (16)..(16): Xaa can be any naturally occurring amino acid
CCEYCCNXPACTXGCXY

SEQ ID NO: 1436 - protein, 18 aa, Artificial Sequence
  Synthetically generated peptide
  VARIANT (8)..(13): Xaa = Any Amino Acid
  misc_feature (16)..(17): Xaa can be any naturally occurring amino acid
CCEYCCNXPACTXGCXXY

SEQ ID NO: 1437 - protein, 16 aa, Artificial Sequence
  Synthetically generated peptide
  VARIANT (1)..(16): Xaa = Any Amino Acid
  VARIANT (8)..(14): Xaa = Any Amino Acid
CCEYCCNXPACTGXCY

SEQ ID NO: 1438 - protein, 17 aa, Artificial Sequence
  Synthetically generated peptide
  VARIANT (8)..(14): Xaa = Any Amino Acid
  misc_feature (15)..(15): Xaa can be any naturally occurring amino acid
CCEYCCNXPACTGXXCY

SEQ ID NO: 1439 - protein, 18 aa, Artificial Sequence
  Synthetically generated peptide
  VARIANT (8)..(14): Xaa = Any Amino Acid
  misc_feature (15)..(16): Xaa can be any naturally occurring amino acid
CCEYCCNXPACTGXXXCY

SEQ ID NO: 1440 - protein, 18 aa, Artificial Sequence
  Synthetically generated peptide
  VARIANT (8)..(14): Xaa = Any Amino Acid
  misc_feature (15)..(15): Xaa can be any naturally occurring amino acid
  misc_feature (17)..(17): Xaa can be any naturally occurring amino acid
CCEYCCNXPACTGXXCXY

SEQ ID NO: 1441 - protein, 17 aa, Artificial Sequence
  Synthetically generated peptide
  VARIANT (8)..(14): Xaa = Any Amino Acid
  misc_feature (16)..(16): Xaa can be any naturally occurring amino acid
CCEYCCNXPACTGXCXY

SEQ ID NO: 1442 - protein, 18 aa, Artificial Sequence
  Synthetically generated peptide
  VARIANT (8)..(14): Xaa = Any Amino Acid
  misc_feature (16)..(17): Xaa can be any naturally occurring amino acid
CCEYCCNXPACTGXCXXY

SEQ ID NO: 1443 - protein, 16 aa, Artificial Sequence
  Synthetically generated peptide
  VARIANT (8)..(15): Xaa = Any Amino Acid
CCEYCCNXPACTGCXY

SEQ ID NO: 1444 - protein, 17 aa, Artificial Sequence
  Synthetically generated peptide
  VARIANT (8)..(15): Xaa = Any Amino Acid
  misc_feature (16)..(16): Xaa can be any naturally occurring amino acid
CCEYCCNXPACTGCXXY

SEQ ID NO: 1445 - protein, 18 aa, Artificial Sequence
  Synthetically generated peptide
  VARIANT (8)..(15): Xaa = Any Amino Acid
  misc_feature (16)..(17): Xaa can be any naturally occurring amino acid
CCEYCCNXPACTGCXXXY

SEQ ID NO: 1446 - protein, 15 aa, Artificial Sequence
  Synthetically generated peptide
  VARIANT (9)..(9): Xaa = Any Amino Acid
CCEYCCNPXACTGCY

SEQ ID NO: 1447 - protein, 16 aa, Artificial Sequence
  Synthetically generated peptide
  VARIANT (9)..(10): Xaa = Any Amino Acid
CCEYCCNPXXACTGCY

SEQ ID NO: 1448 - protein, 17 aa, Artificial Sequence
  Synthetically generated peptide
  VARIANT (9)..(10): Xaa = Any Amino Acid
  misc_feature (11)..(11): Xaa can be any naturally occurring amino acid
CCEYCCNPXXXACTGCY

SEQ ID NO: 1449 - protein, 18 aa, Artificial Sequence
  Synthetically generated peptide
  VARIANT (9)..(10): Xaa = Any Amino Acid
  misc_feature (11)..(12): Xaa can be any naturally occurring amino acid
CCEYCCNPXXXXACTGCY

SEQ ID NO: 1450 - protein, 18 aa, Artificial Sequence
  Synthetically generated peptide
  VARIANT (9)..(10): Xaa = Any Amino Acid
  misc_feature (11)..(11): Xaa can be any naturally occurring amino acid
  misc_feature (13)..(13): Xaa can be any naturally occurring amino acid
CCEYCCNPXXXAXCTGCY

SEQ ID NO: 1451 - protein, 18 aa, Artificial Sequence
  Synthetically generated peptide
  VARIANT (9)..(10): Xaa = Any Amino Acid
  misc_feature (11)..(11): Xaa can be any naturally occurring amino acid
  misc_feature (14)..(14): Xaa can be any naturally occurring amino acid
CCEYCCNPXXXACXTGCY

SEQ ID NO: 1452 - protein, 18 aa, Artificial Sequence
  Synthetically generated peptide
  VARIANT (9)..(10): Xaa = Any Amino Acid
  misc_feature (11)..(11): Xaa can be any naturally occurring amino acid
  misc_feature (15)..(15): Xaa can be any naturally occurring amino acid
CCEYCCNPXXXACTXGCY

SEQ ID NO: 1453 - protein, 18 aa, Artificial Sequence
  Synthetically generated peptide
  VARIANT (9)..(10): Xaa = Any Amino Acid
  misc_feature (11)..(11): Xaa can be any naturally occurring amino acid
  misc_feature (16)..(16): Xaa can be any naturally occurring amino acid
CCEYCCNPXXXACTGXCY

SEQ ID NO: 1454 - protein, 18 aa, Artificial Sequence
  Synthetically generated peptide
  VARIANT (9)..(10): Xaa = Any Amino Acid
  misc_feature (11)..(11): Xaa can be any naturally occurring amino acid
  misc_feature (17)..(17): Xaa can be any naturally occurring amino acid
CCEYCCNPXXXACTGCXY

SEQ ID NO: 1455 - protein, 17 aa, Artificial Sequence
  Synthetically generated peptide
  VARIANT (9)..(10): Xaa = Any Amino Acid
  misc_feature (12)..(12): Xaa can be any naturally occurring amino acid
CCEYCCNPXXAXCTGCY

SEQ ID NO: 1456 - protein, 18 aa, Artificial Sequence
  Synthetically generated peptide
  VARIANT (9)..(10): Xaa = Any Amino Acid
  misc_feature (12)..(13): Xaa can be any naturally occurring amino acid
CCEYCCNPXXAXXCTGCY

SEQ ID NO: 1457 - protein, 18 aa, Artificial Sequence
  Synthetically generated peptide
  VARIANT (9)..(10): Xaa = Any Amino Acid
  misc_feature (12)..(12): Xaa can be any naturally occurring amino acid
  misc_feature (14)..(14): Xaa can be any naturally occurring amino acid
CCEYCCNPXXAXCXTGCY

SEQ ID NO: 1458 - protein, 18 aa, Artificial Sequence
  Synthetically generated peptide
  VARIANT (9)..(10): Xaa = Any Amino Acid
  misc_feature (12)..(12): Xaa can be any naturally occurring amino acid
  misc_feature (15)..(15): Xaa can be any naturally occurring amino acid
CCEYCCNPXXAXCTXGCY

SEQ ID NO: 1459 - protein, 18 aa, Artificial Sequence
  Synthetically generated peptide
  VARIANT (9)..(10): Xaa = Any Amino Acid
  misc_feature (12)..(12): Xaa can be any naturally occurring amino acid
  misc_feature (16)..(16): Xaa can be any naturally occurring amino acid
CCEYCCNPXXAXCTGXCY

SEQ ID NO: 1460 - protein, 18 aa, Artificial Sequence
  Synthetically generated peptide
  VARIANT (9)..(10): Xaa = Any Amino Acid
  misc_feature (12)..(12): Xaa can be any naturally occurring amino acid
  misc_feature (17)..(17): Xaa can be any naturally occurring amino acid
CCEYCCNPXXAXCTGCXY

SEQ ID NO: 1461 - protein, 17 aa, Artificial Sequence
  Synthetically generated peptide
  VARIANT (9)..(10): Xaa = Any Amino Acid
  misc_feature (13)..(13): Xaa can be any naturally occurring amino acid
CCEYCCNPXXACXTGCY

SEQ ID NO: 1462 - protein, 18 aa, Artificial Sequence
  Synthetically generated peptide
  VARIANT (9)..(10): Xaa = Any Amino Acid
  misc_feature (13)..(14): Xaa can be any naturally occurring amino acid
CCEYCCNPXXACXXTGCY

SEQ ID NO: 1463 - protein, 18 aa, Artificial Sequence
  Synthetically generated peptide
  VARIANT (9)..(10): Xaa = Any Amino Acid
  misc_feature (13)..(13): Xaa can be any naturally occurring amino acid
  misc_feature (15)..(15): Xaa can be any naturally occurring amino acid
CCEYCCNPXXACXTXGCY

SEQ ID NO: 1464 - protein, 18 aa, Artificial Sequence
  Synthetically generated peptide
  VARIANT (9)..(10): Xaa = Any Amino Acid
  misc_feature (13)..(13): Xaa can be any naturally occurring amino acid
  misc_feature (16)..(16): Xaa can be any naturally occurring amino acid
CCEYCCNPXXACXTGXCY

SEQ ID NO: 1465 - protein, 18 aa, Artificial Sequence
  Synthetically generated peptide
  VARIANT (9)..(10): Xaa = Any Amino Acid
  misc_feature (13)..(13): Xaa can be any naturally occurring amino acid
  misc_feature (17)..(17): Xaa can be any naturally occurring amino acid
CCEYCCNPXXACXTGCXY

SEQ ID NO: 1466 - protein, 17 aa, Artificial Sequence
  Synthetically generated peptide
  VARIANT (9)..(10): Xaa = Any Amino Acid
  misc_feature (14)..(14): Xaa can be any naturally occurring amino acid
CCEYCCNPXXACTXGCY

SEQ ID NO: 1467 - protein, 18 aa, Artificial Sequence
  Synthetically generated peptide
  VARIANT (9)..(10): Xaa = Any Amino Acid
  misc_feature (14)..(15): Xaa can be any naturally occurring amino acid
CCEYCCNPXXACTXXGCY

SEQ ID NO: 1468 - protein, 18 aa, Artificial Sequence
  Synthetically generated peptide
  VARIANT (9)..(10): Xaa = Any Amino Acid
  misc_feature (14)..(14): Xaa can be any naturally occurring amino acid
  misc_feature (16)..(16): Xaa can be any naturally occurring amino acid
CCEYCCNPXXACTXGXCY

SEQ ID NO: 1469 - protein, 18 aa, Artificial Sequence
  Synthetically generated peptide
  VARIANT (9)..(10): Xaa = Any Amino Acid
  misc_feature (14)..(14): Xaa can be any naturally occurring amino acid
  misc_feature (17)..(17): Xaa can be any naturally occurring amino acid
CCEYCCNPXXACTXGCXY

SEQ ID NO: 1470 - protein, 17 aa, Artificial Sequence
  Synthetically generated peptide
  VARIANT (9)..(10): Xaa = Any Amino Acid
  misc_feature (15)..(15): Xaa can be any naturally occurring amino acid
CCEYCCNPXXACTGXCY

SEQ ID NO: 1471 - protein, 18 aa, Artificial Sequence
  Synthetically generated peptide
  VARIANT (9)..(10): Xaa = Any Amino Acid
  misc_feature (15)..(16): Xaa can be any naturally occurring amino acid
CCEYCCNPXXACTGXXCY

SEQ ID NO: 1472 - protein, 18 aa, Artificial Sequence
  Synthetically generated peptide
  VARIANT (9)..(10): Xaa = Any Amino Acid
  misc_feature (15)..(15): Xaa can be any naturally occurring amino acid
  misc_feature (17)..(17): Xaa can be any naturally occurring amino acid
CCEYCCNPXXACTGXCXY

SEQ ID NO: 1473 - protein, 17 aa, Artificial Sequence
  Synthetically generated peptide
  VARIANT (9)..(10): Xaa = Any Amino Acid
  misc_feature (16)..(16): Xaa can be any naturally occurring amino acid
CCEYCCNPXXACTGCXY

SEQ ID NO: 1474 - protein, 18 aa, Artificial Sequence
  Synthetically generated peptide
  VARIANT (9)..(10): Xaa = Any Amino Acid
  misc_feature (16)..(17): Xaa can be any naturally occurring amino acid
CCEYCCNPXXACTGCXXY

SEQ ID NO: 1475 - protein, 16 aa, Artificial Sequence
  Synthetically generated peptide
  VARIANT (1)..(16): Xaa = Any Amino Acid
  VARIANT (9)..(11): Xaa = Any Amino Acid
CCEYCCNPXAXCTGCY

SEQ ID NO: 1476 - protein, 17 aa, Artificial Sequence
  Synthetically generated peptide
  VARIANT (9)..(11): Xaa = Any Amino Acid
  misc_feature (12)..(12): Xaa can be any naturally occurring amino acid
CCEYCCNPXAXXCTGCY

SEQ ID NO: 1477 - protein, 18 aa, Artificial Sequence
  Synthetically generated peptide
  VARIANT (9)..(11): Xaa = Any Amino Acid
  misc_feature (12)..(13): Xaa can be any naturally occurring amino acid
CCEYCCNPXAXXXCTGCY

SEQ ID NO: 1478 - protein, 18 aa, Artificial Sequence
  Synthetically generated peptide
  VARIANT (9)..(11): Xaa = Any Amino Acid
  misc_feature (12)..(12): Xaa can be any naturally occurring amino acid
  misc_feature (14)..(14): Xaa can be any naturally occurring amino acid
CCEYCCNPXAXXCXTGCY

SEQ ID NO: 1479 - protein, 18 aa, Artificial Sequence
  Synthetically generated peptide
  VARIANT (9)..(11): Xaa = Any Amino Acid
  misc_feature (12)..(12): Xaa can be any naturally occurring amino acid
  misc_feature (15)..(15): Xaa can be any naturally occurring amino acid
CCEYCCNPXAXXCTXGCY

SEQ ID NO: 1480 - protein, 18 aa, Artificial Sequence
  Synthetically generated peptide
  VARIANT (9)..(11): Xaa = Any Amino Acid
  misc_feature (12)..(12): Xaa can be any naturally occurring amino acid
  misc_feature (16)..(16): Xaa can be any naturally occurring amino acid
CCEYCCNPXAXXCTGXCY

SEQ ID NO: 1481 - protein, 18 aa, Artificial Sequence
  Synthetically generated peptide
  VARIANT (9)..(11): Xaa = Any Amino Acid
  misc_feature (12)..(12): Xaa can be any naturally occurring amino acid
  misc_feature (17)..(17): Xaa can be any naturally occurring amino acid
CCEYCCNPXAXXCTGCXY

SEQ ID NO: 1482 - protein, 17 aa, Artificial Sequence
  Synthetically generated peptide
  VARIANT (9)..(11): Xaa = Any Amino Acid
  misc_feature (13)..(13): Xaa can be any naturally occurring amino acid
CCEYCCNPXAXCXTGCY

SEQ ID NO: 1483 - protein, 18 aa, Artificial Sequence
  Synthetically generated peptide
  VARIANT (9)..(11): Xaa = Any Amino Acid
  misc_feature (13)..(14): Xaa can be any naturally occurring amino acid
CCEYCCNPXAXCXXTGCY

SEQ ID NO: 1484 - protein, 18 aa, Artificial Sequence
  Synthetically generated peptide
  VARIANT (9)..(11): Xaa = Any Amino Acid
  misc_feature (13)..(13): Xaa can be any naturally occurring amino acid
  misc_feature (15)..(15): Xaa can be any naturally occurring amino acid
CCEYCCNPXAXCXTXGCY

SEQ ID NO: 1485 - protein, 18 aa, Artificial Sequence
  Synthetically generated peptide
  VARIANT (9)..(11): Xaa = Any Amino Acid
  misc_feature (13)..(13): Xaa can be any naturally occurring amino acid
  misc_feature (16)..(16): Xaa can be any naturally occurring amino acid
CCEYCCNPXAXCXTGXCY

SEQ ID NO: 1486 - protein, 18 aa, Artificial Sequence
  Synthetically generated peptide
  VARIANT (9)..(11): Xaa = Any Amino Acid
  misc_feature (13)..(13): Xaa can be any naturally occurring amino acid
  misc_feature (17)..(17): Xaa can be any naturally occurring amino acid
CCEYCCNPXAXCXTGCXY

SEQ ID NO: 1487 - protein, 17 aa, Artificial Sequence
  Synthetically generated peptide
  VARIANT (9)..(11): Xaa = Any Amino Acid
  misc_feature (14)..(14): Xaa can be any naturally occurring amino acid
CCEYCCNPXAXCTXGCY

SEQ ID NO: 1488 - protein, 18 aa, Artificial Sequence
  Synthetically generated peptide
  VARIANT (9)..(11): Xaa = Any Amino Acid
  misc_feature (14)..(15): Xaa can be any naturally occurring amino acid
CCEYCCNPXAXCTXXGCY

SEQ ID NO: 1489 - protein, 18 aa, Artificial Sequence
  Synthetically generated peptide
  VARIANT (9)..(11): Xaa = Any Amino Acid
  misc_feature (14)..(14): Xaa can be any naturally occurring amino acid
  misc_feature (16)..(16): Xaa can be any naturally occurring amino acid
CCEYCCNPXAXCTXGXCY

SEQ ID NO: 1490 - protein, 18 aa, Artificial Sequence
  Synthetically generated peptide
  VARIANT (9)..(11): Xaa = Any Amino Acid
  misc_feature (14)..(14): Xaa can be any naturally occurring amino acid
  misc_feature (17)..(17): Xaa can be any naturally occurring amino acid
CCEYCCNPXAXCTXGCXY

SEQ ID NO: 1491 - protein, 17 aa, Artificial Sequence
  Synthetically generated peptide
  VARIANT (9)..(11): Xaa = Any Amino Acid
  misc_feature (15)..(15): Xaa can be any naturally occurring amino acid
CCEYCCNPXAXCTGXCY

SEQ ID NO: 1492 - protein, 18 aa, Artificial Sequence
  Synthetically generated peptide
  VARIANT (9)..(11): Xaa = Any Amino Acid
  misc_feature (15)..(16): Xaa can be any naturally occurring amino acid
CCEYCCNPXAXCTGXXCY

SEQ ID NO: 1493 - protein, 18 aa, Artificial Sequence
  Synthetically generated peptide
  VARIANT (9)..(11): Xaa = Any Amino Acid
  misc_feature (15)..(15): Xaa can be any naturally occurring amino acid
  misc_feature (17)..(17): Xaa can be any naturally occurring amino acid
CCEYCCNPXAXCTGXCXY

SEQ ID NO: 1494 - protein, 17 aa, Artificial Sequence
  Synthetically generated peptide
  VARIANT (9)..(11): Xaa = Any Amino Acid
  misc_feature (16)..(16): Xaa can be any naturally occurring amino acid
CCEYCCNPXAXCTGCXY

SEQ ID NO: 1495 - protein, 18 aa, Artificial Sequence
  Synthetically generated peptide
  VARIANT (9)..(11): Xaa = Any Amino Acid
  misc_feature (16)..(17): Xaa can be any naturally occurring amino acid
CCEYCCNPXAXCTGCXXY

SEQ ID NO: 1496 - protein, 16 aa, Artificial Sequence
  Synthetically generated peptide
  VARIANT (9)..(12): Xaa = Any Amino Acid
CCEYCCNPXACXTGCY

SEQ ID NO: 1497 - protein, 17 aa, Artificial Sequence
  Synthetically generated peptide
  VARIANT (9)..(12): Xaa = Any Amino Acid
  misc_feature (13)..(13): Xaa can be any naturally occurring amino acid
CCEYCCNPXACXXTGCY

SEQ ID NO: 1498 - protein, 18 aa, Artificial Sequence
  Synthetically generated peptide
  VARIANT (9)..(12): Xaa = Any Amino Acid
  misc_feature (13)..(14): Xaa can be any naturally occurring amino acid
CCEYCCNPXACXXXTGCY

SEQ ID NO: 1499 - protein, 18 aa, Artificial Sequence
  Synthetically generated peptide
  VARIANT (9)..(12): Xaa = Any Amino Acid
  misc_feature (13)..(13): Xaa can be any naturally occurring amino acid
  misc_feature (15)..(15): Xaa can be any naturally occurring amino acid
CCEYCCNPXACXXTXGCY

SEQ ID NO: 1500 - protein, 18 aa, Artificial Sequence
  Synthetically generated peptide
  VARIANT (9)..(12): Xaa = Any Amino Acid
  misc_feature (13)..(13): Xaa can be any naturally occurring amino acid
  misc_feature (16)..(16): Xaa can be any naturally occurring amino acid
CCEYCCNPXACXXTGXCY

SEQ ID NO: 1501 - protein, 18 aa, Artificial Sequence
  Synthetically generated peptide
  VARIANT (9)..(12): Xaa = Any Amino Acid
  misc_feature (13)..(13): Xaa can be any naturally occurring amino acid
  misc_feature (17)..(17): Xaa can be any naturally occurring amino acid
CCEYCCNPXACXXTGCXY

SEQ ID NO: 1502 - protein, 17 aa, Artificial Sequence
  Synthetically generated peptide
  VARIANT (9)..(12): Xaa = Any Amino Acid
  misc_feature (14)..(14): Xaa can be any naturally occurring amino acid
CCEYCCNPXACXTXGCY

SEQ ID NO: 1503 - protein, 18 aa, Artificial Sequence
  Synthetically generated peptide
  VARIANT (9)..(12): Xaa = Any Amino Acid
  misc_feature (14)..(15): Xaa can be any naturally occurring amino acid
CCEYCCNPXACXTXXGCY

SEQ ID NO: 1504 - protein, 18 aa, Artificial Sequence
  Synthetically generated peptide
  VARIANT (9)..(12): Xaa = Any Amino Acid
  misc_feature (14)..(14): Xaa can be any naturally occurring amino acid
  misc_feature (16)..(16): Xaa can be any naturally occurring amino acid
CCEYCCNPXACXTXGXCY

SEQ ID NO: 1505 - protein, 18 aa, Artificial Sequence
  Synthetically generated peptide
  VARIANT (9)..(12): Xaa = Any Amino Acid
  misc_feature (14)..(14): Xaa can be any naturally occurring amino acid
  misc_feature (17)..(17): Xaa can be any naturally occurring amino acid
CCEYCCNPXACXTXGCXY

SEQ ID NO: 1506 - protein, 17 aa, Artificial Sequence
  Synthetically generated peptide
  VARIANT (9)..(12): Xaa = Any Amino Acid
  misc_feature (15)..(15): Xaa can be any naturally occurring amino acid
CCEYCCNPXACXTGXCY

SEQ ID NO: 1507 - protein, 18 aa, Artificial Sequence
  Synthetically generated peptide
  VARIANT (9)..(12): Xaa = Any Amino Acid
  misc_feature (15)..(16): Xaa can be any naturally occurring amino acid
CCEYCCNPXACXTGXXCY

SEQ ID NO: 1508 - protein, 18 aa, Artificial Sequence
  Synthetically generated peptide
  VARIANT (9)..(12): Xaa = Any Amino Acid
  misc_feature (15)..(15): Xaa can be any naturally occurring amino acid
  misc_feature (17)..(17): Xaa can be any naturally occurring amino acid
CCEYCCNPXACXTGXCXY

SEQ ID NO: 1509 - protein, 17 aa, Artificial Sequence
  Synthetically generated peptide
  VARIANT (9)..(12): Xaa = Any Amino Acid
  misc_feature (16)..(16): Xaa can be any naturally occurring amino acid
CCEYCCNPXACXTGCXY

SEQ ID NO: 1510 - protein, 18 aa, Artificial Sequence
  Synthetically generated peptide
  VARIANT (9)..(12): Xaa = Any Amino Acid
  misc_feature (16)..(17): Xaa can be any naturally occurring amino acid
CCEYCCNPXACXTGCXXY

SEQ ID NO: 1511 - protein, 16 aa, Artificial Sequence
  Synthetically generated peptide
  VARIANT (1)..(16): Xaa = Any Amino Acid
  VARIANT (9)..(13): Xaa = Any Amino Acid
CCEYCCNPXACTXGCY

SEQ ID NO: 1512 - protein, 17 aa, Artificial Sequence
  Synthetically generated peptide
  VARIANT (9)..(13): Xaa = Any Amino Acid
  misc_feature (14)..(14): Xaa can be any naturally occurring amino acid
CCEYCCNPXACTXXGCY

SEQ ID NO: 1513 - protein, 18 aa, Artificial Sequence
  Synthetically generated peptide
  VARIANT (9)..(13): Xaa = Any Amino Acid
  misc_feature (14)..(15): Xaa can be any naturally occurring amino acid
CCEYCCNPXACTXXXGCY

SEQ ID NO: 1514 - protein, 18 aa, Artificial Sequence
  Synthetically generated peptide
  VARIANT (9)..(13): Xaa = Any Amino Acid
  misc_feature (14)..(14): Xaa can be any naturally occurring amino acid
  misc_feature (16)..(16): Xaa can be any naturally occurring amino acid
CCEYCCNPXACTXXGXCY

SEQ ID NO: 1515 - protein, 18 aa, Artificial Sequence
  Synthetically generated peptide
  VARIANT (9)..(13): Xaa = Any Amino Acid
  misc_feature (14)..(14): Xaa can be any naturally occurring amino acid
  misc_feature (17)..(17): Xaa can be any naturally occurring amino acid
CCEYCCNPXACTXXGCXY

SEQ ID NO: 1516 - protein, 17 aa, Artificial Sequence
  Synthetically generated peptide
  VARIANT (9)..(13): Xaa = Any Amino Acid
  misc_feature (15)..(15): Xaa can be any naturally occurring amino acid
CCEYCCNPXACTXGXCY

SEQ ID NO: 1517 - protein, 18 aa, Artificial Sequence
  Synthetically generated peptide
  VARIANT (9)..(13): Xaa = Any Amino Acid
  misc_feature (15)..(16): Xaa can be any naturally occurring amino acid
CCEYCCNPXACTXGXXCY

SEQ ID NO: 1518 - protein, 18 aa, Artificial Sequence
  Synthetically generated peptide
  VARIANT (9)..(13): Xaa = Any Amino Acid
  misc_feature (15)..(15): Xaa can be any naturally occurring amino acid
  misc_feature (17)..(17): Xaa can be any naturally occurring amino acid
CCEYCCNPXACTXGXCXY

SEQ ID NO: 1519 - protein, 17 aa, Artificial Sequence
  Synthetically generated peptide
  VARIANT (9)..(13): Xaa = Any Amino Acid
  misc_feature (16)..(16): Xaa can be any naturally occurring amino acid
CCEYCCNPXACTXGCXY

SEQ ID NO: 1520 - protein, 18 aa, Artificial Sequence
  Synthetically generated peptide
  VARIANT (9)..(13): Xaa = Any Amino Acid
  misc_feature (16)..(17): Xaa can be any naturally occurring amino acid
CCEYCCNPXACTXGCXXY

SEQ ID NO: 1521 - protein, 16 aa, Artificial Sequence
  Synthetically generated peptide
  VARIANT (1)..(16): Xaa = Any Amino Acid
  VARIANT (9)..(14): Xaa = Any Amino Acid
CCEYCCNPXACTGXCY

SEQ ID NO: 1522 - protein, 17 aa, Artificial Sequence
  Synthetically generated peptide
  VARIANT (9)..(14): Xaa = Any Amino Acid
  misc_feature (15)..(15): Xaa can be any naturally occurring amino acid
CCEYCCNPXACTGXXCY

SEQ ID NO: 1523 - protein, 18 aa, Artificial Sequence
  Synthetically generated peptide
  VARIANT (9)..(14): Xaa = Any Amino Acid
  misc_feature (15)..(16): Xaa can be any naturally occurring amino acid
CCEYCCNPXACTGXXXCY

SEQ ID NO: 1524 - protein, 18 aa, Artificial Sequence
  Synthetically generated peptide
  VARIANT (9)..(14): Xaa = Any Amino Acid
  misc_feature (15)..(15): Xaa can be any naturally occurring amino acid
  misc_feature (17)..(17): Xaa can be any naturally occurring amino acid
CCEYCCNPXACTGXXCXY

SEQ ID NO: 1525 - protein, 17 aa, Artificial Sequence
  Synthetically generated peptide
  VARIANT (9)..(14): Xaa = Any Amino Acid
  misc_feature (16)..(16): Xaa can be any naturally occurring amino acid
CCEYCCNPXACTGXCXY

SEQ ID NO: 1526 - protein, 18 aa, Artificial Sequence
  Synthetically generated peptide
  VARIANT (9)..(14): Xaa = Any Amino Acid
  misc_feature (16)..(17): Xaa can be any naturally occurring amino acid
CCEYCCNPXACTGXCXXY

SEQ ID NO: 1527 - protein, 16 aa, Artificial Sequence
  Synthetically generated peptide
  VARIANT (1)..(16): Xaa = Any Amino Acid
  VARIANT (9)..(15): Xaa = Any Amino Acid
CCEYCCNPXACTGCXY

SEQ ID NO: 1528 - protein, 17 aa, Artificial Sequence
  Synthetically generated peptide
  VARIANT (9)..(15): Xaa = Any Amino Acid
  misc_feature (16)..(16): Xaa can be any naturally occurring amino acid
CCEYCCNPXACTGCXXY

SEQ ID NO: 1529 - protein, 18 aa, Artificial Sequence
  Synthetically generated peptide
  VARIANT (9)..(15): Xaa = Any Amino Acid
  misc_feature (16)..(17): Xaa can be any naturally occurring amino acid
CCEYCCNPXACTGCXXXY

SEQ ID NO: 1530 - protein, 15 aa, Artificial Sequence
  Synthetically generated peptide
  VARIANT (1)..(15): Xaa = Any Amino Acid
  VARIANT (10)..(10): Xaa = Any Amino Acid
CCEYCCNPAXCTGCY

SEQ ID NO: 1531 - protein, 16 aa, Artificial Sequence
  Synthetically generated peptide
  VARIANT (10)..(11): Xaa = Any Amino Acid
CCEYCCNPAXXCTGCY

SEQ ID NO: 1532 - protein, 17 aa, Artificial Sequence
  Synthetically generated peptide
  VARIANT (10)..(11): Xaa = Any Amino Acid
  misc_feature (12)..(12): Xaa can be any naturally occurring amino acid
CCEYCCNPAXXXCTGCY

SEQ ID NO: 1533 - protein, 18 aa, Artificial Sequence
  Synthetically generated peptide
  VARIANT (10)..(11): Xaa = Any Amino Acid
  misc_feature (12)..(13): Xaa can be any naturally occurring amino acid
CCEYCCNPAXXXXCTGCY

SEQ ID NO: 1534 - protein, 18 aa, Artificial Sequence
  Synthetically generated peptide
  VARIANT (10)..(11): Xaa = Any Amino Acid
  misc_feature (12)..(12): Xaa can be any naturally occurring amino acid
  misc_feature (14)..(14): Xaa can be any naturally occurring amino acid
CCEYCCNPAXXXCXTGCY

SEQ ID NO: 1535 - protein, 18 aa, Artificial Sequence
  Synthetically generated peptide
  VARIANT (10)..(11): Xaa = Any Amino Acid
  misc_feature (12)..(12): Xaa can be any naturally occurring amino acid
  misc_feature (15)..(15): Xaa can be any naturally occurring amino acid
CCEYCCNPAXXXCTXGCY

SEQ ID NO: 1536 - protein, 18 aa, Artificial Sequence
  Synthetically generated peptide
  VARIANT (10)..(11): Xaa = Any Amino Acid
  misc_feature (12)..(12): Xaa can be any naturally occurring amino acid
  misc_feature (16)..(16): Xaa can be any naturally occurring amino acid
CCEYCCNPAXXXCTGXCY

SEQ ID NO: 1537 - protein, 18 aa, Artificial Sequence
  Synthetically generated peptide
  VARIANT (10)..(11): Xaa = Any Amino Acid
  misc_feature (12)..(12): Xaa can be any naturally occurring amino acid
  misc_feature (17)..(17): Xaa can be any naturally occurring amino acid
CCEYCCNPAXXXCTGCXY

SEQ ID NO: 1538 - protein, 17 aa, Artificial Sequence
  Synthetically generated peptide
  VARIANT (10)..(11): Xaa = Any Amino Acid
  misc_feature (13)..(13): Xaa can be any naturally occurring amino acid
CCEYCCNPAXXCXTGCY

SEQ ID NO: 1539 - protein, 18 aa, Artificial Sequence
  Synthetically generated peptide
  VARIANT (10)..(11): Xaa = Any Amino Acid
  misc_feature (13)..(14): Xaa can be any naturally occurring amino acid
CCEYCCNPAXXCXXTGCY

SEQ ID NO: 1540 - protein, 18 aa, Artificial Sequence
  Synthetically generated peptide
  VARIANT (10)..(11): Xaa = Any Amino Acid
  misc_feature (13)..(13): Xaa can be any naturally occurring amino acid
  misc_feature (15)..(15): Xaa can be any naturally occurring amino acid
CCEYCCNPAXXCXTXGCY

SEQ ID NO: 1541 - protein, 18 aa, Artificial Sequence
  Synthetically generated peptide
  VARIANT (10)..(11): Xaa = Any Amino Acid
  misc_feature (13)..(13): Xaa can be any naturally occurring amino acid
  misc_feature (16)..(16): Xaa can be any naturally occurring amino acid
CCEYCCNPAXXCXTGXCY

SEQ ID NO: 1542 - protein, 18 aa, Artificial Sequence
  Synthetically generated peptide
  VARIANT (10)..(11): Xaa = Any Amino Acid
  misc_feature (13)..(13): Xaa can be any naturally occurring amino acid
  misc_feature (17)..(17): Xaa can be any naturally occurring amino acid
CCEYCCNPAXXCXTGCXY

SEQ ID NO: 1543 - protein, 17 aa, Artificial Sequence
  Synthetically generated peptide
  VARIANT (10)..(11): Xaa = Any Amino Acid
  misc_feature (14)..(14): Xaa can be any naturally occurring amino acid
CCEYCCNPAXXCTXGCY

SEQ ID NO: 1544 - protein, 18 aa, Artificial Sequence
  Synthetically generated peptide
  VARIANT (10)..(11): Xaa = Any Amino Acid
  misc_feature (14)..(15): Xaa can be any naturally occurring amino acid
CCEYCCNPAXXCTXXGCY

SEQ ID NO: 1545 - protein, 18 aa, Artificial Sequence
  Synthetically generated peptide
  VARIANT (10)..(11): Xaa = Any Amino Acid
  misc_feature (14)..(14): Xaa can be any naturally occurring amino acid
  misc_feature (16)..(16): Xaa can be any naturally occurring amino acid
CCEYCCNPAXXCTXGXCY

SEQ ID NO: 1546 - protein, 18 aa, Artificial Sequence
  Synthetically generated peptide
  VARIANT (10)..(11): Xaa = Any Amino Acid
  misc_feature (14)..(14): Xaa can be any naturally occurring amino acid
  misc_feature (17)..(17): Xaa can be any naturally occurring amino acid
CCEYCCNPAXXCTXGCXY

SEQ ID NO: 1547 - protein, 17 aa, Artificial Sequence
  Synthetically generated peptide
  VARIANT (10)..(11): Xaa = Any Amino Acid
  misc_feature (15)..(15): Xaa can be any naturally occurring amino acid
CCEYCCNPAXXCTGXCY

SEQ ID NO: 1548 - protein, 18 aa, Artificial Sequence
  Synthetically generated peptide
  VARIANT (10)..(11): Xaa = Any Amino Acid
  misc_feature (15)..(16): Xaa can be any naturally occurring amino acid
CCEYCCNPAXXCTGXXCY

SEQ ID NO: 1549 - protein, 18 aa, Artificial Sequence
  Synthetically generated peptide
  VARIANT (10)..(11): Xaa = Any Amino Acid
  misc_feature (15)..(15): Xaa can be any naturally occurring amino acid
  misc_feature (17)..(17): Xaa can be any naturally occurring amino acid
CCEYCCNPAXXCTGXCXY

SEQ ID NO: 1550 - protein, 17 aa, Artificial Sequence
  Synthetically generated peptide
  VARIANT (10)..(11): Xaa = Any Amino Acid
  misc_feature (16)..(16): Xaa can be any naturally occurring amino acid
CCEYCCNPAXXCTGCXY

SEQ ID NO: 1551 - protein, 18 aa, Artificial Sequence
  Synthetically generated peptide
  VARIANT (10)..(11): Xaa = Any Amino Acid
  misc_feature (16)..(17): Xaa can be any naturally occurring amino acid
CCEYCCNPAXXCTGCXXY

SEQ ID NO: 1552 - protein, 16 aa, Artificial Sequence
  Synthetically generated peptide
  VARIANT (10)..(12): Xaa = Any Amino Acid
CCEYCCNPAXCXTGCY

SEQ ID NO: 1553 - protein, 17 aa, Artificial Sequence
  Synthetically generated peptide
  VARIANT (10)..(12): Xaa = Any Amino Acid
  misc_feature (13)..(13): Xaa can be any naturally occurring amino acid
CCEYCCNPAXCXXTGCY

SEQ ID NO: 1554 - protein, 18 aa, Artificial Sequence
  Synthetically generated peptide
  VARIANT (10)..(12): Xaa = Any Amino Acid
  misc_feature (13)..(14): Xaa can be any naturally occurring amino acid
CCEYCCNPAXCXXXTGCY

SEQ ID NO: 1555 - protein, 18 aa, Artificial Sequence
  Synthetically generated peptide
  VARIANT (10)..(12): Xaa = Any Amino Acid
  misc_feature (13)..(13): Xaa can be any naturally occurring amino acid
  misc_feature (15)..(15): Xaa can be any naturally occurring amino acid
CCEYCCNPAXCXXTXGCY

SEQ ID NO: 1556 - protein, 18 aa, Artificial Sequence
  Synthetically generated peptide
  VARIANT (10)..(12): Xaa = Any Amino Acid
  misc_feature (13)..(13): Xaa can be any naturally occurring amino acid
  misc_feature (16)..(16): Xaa can be any naturally occurring amino acid
CCEYCCNPAXCXXTGXCY

SEQ ID NO: 1557 - protein, 18 aa, Artificial Sequence
  Synthetically generated peptide
  VARIANT (10)..(12): Xaa = Any Amino Acid
  misc_feature (13)..(13): Xaa can be any naturally occurring amino acid
  misc_feature (17)..(17): Xaa can be any naturally occurring amino acid
CCEYCCNPAXCXXTGCXY

SEQ ID NO: 1558 - protein, 17 aa, Artificial Sequence
  Synthetically generated peptide
  VARIANT (10)..(12): Xaa = Any Amino Acid
  misc_feature (14)..(14): Xaa can be any naturally occurring amino acid
CCEYCCNPAXCXTXGCY

SEQ ID NO: 1559 - protein, 18 aa, Artificial Sequence
  Synthetically generated peptide
  VARIANT (10)..(12): Xaa = Any Amino Acid
  misc_feature (14)..(15): Xaa can be any naturally occurring amino acid
CCEYCCNPAXCXTXXGCY

SEQ ID NO: 1560 - protein, 18 aa, Artificial Sequence
  Synthetically generated peptide
  VARIANT (10)..(12): Xaa = Any Amino Acid
  misc_feature (14)..(14): Xaa can be any naturally occurring amino acid
  misc_feature (16)..(16): Xaa can be any naturally occurring amino acid
CCEYCCNPAXCXTXGXCY

SEQ ID NO: 1561 - protein, 18 aa, Artificial Sequence
  Synthetically generated peptide
  VARIANT (10)..(12): Xaa = Any Amino Acid
  misc_feature (14)..(14): Xaa can be any naturally occurring amino acid
  misc_feature (17)..(17): Xaa can be any naturally occurring amino acid
CCEYCCNPAXCXTXGCXY

SEQ ID NO: 1562 - protein, 17 aa, Artificial Sequence
  Synthetically generated peptide
  VARIANT (10)..(12): Xaa = Any Amino Acid
  misc_feature (15)..(15): Xaa can be any naturally occurring amino acid
CCEYCCNPAXCXTGXCY

SEQ ID NO: 1563 - protein, 18 aa, Artificial Sequence
  Synthetically generated peptide
  VARIANT (10)..(12): Xaa = Any Amino Acid
  misc_feature (15)..(16): Xaa can be any naturally occurring amino acid
CCEYCCNPAXCXTGXXCY

SEQ ID NO: 1564 - protein, 18 aa, Artificial Sequence
  Synthetically generated peptide
  VARIANT (10)..(12): Xaa = Any Amino Acid
  misc_feature (15)..(15): Xaa can be any naturally occurring amino acid
  misc_feature (17)..(17): Xaa can be any naturally occurring amino acid
CCEYCCNPAXCXTGXCXY

SEQ ID NO: 1565 - protein, 17 aa, Artificial Sequence
  Synthetically generated peptide
  VARIANT (10)..(12): Xaa = Any Amino Acid
  misc_feature (16)..(16): Xaa can be any naturally occurring amino acid
CCEYCCNPAXCXTGCXY

SEQ ID NO: 1566 - protein, 18 aa, Artificial Sequence
  Synthetically generated peptide
  VARIANT (10)..(12): Xaa = Any Amino Acid
  misc_feature (16)..(17): Xaa can be any naturally occurring amino acid
CCEYCCNPAXCXTGCXXY

SEQ ID NO: 1567 - protein, 16 aa, Artificial Sequence
  Synthetically generated peptide
  VARIANT (10)..(13): Xaa = Any Amino Acid
CCEYCCNPAXCTXGCY

SEQ ID NO: 1568 - protein, 17 aa, Artificial Sequence
  Synthetically generated peptide
  VARIANT (10)..(13): Xaa = Any Amino Acid
  misc_feature (14)..(14): Xaa can be any naturally occurring amino acid
CCEYCCNPAXCTXXGCY

SEQ ID NO: 1569 - protein, 18 aa, Artificial Sequence
  Synthetically generated peptide
  VARIANT (10)..(13): Xaa = Any Amino Acid
  misc_feature (14)..(15): Xaa can be any naturally occurring amino acid
CCEYCCNPAXCTXXXGCY

SEQ ID NO: 1570 - protein, 18 aa, Artificial Sequence
  Synthetically generated peptide
  VARIANT (10)..(13): Xaa = Any Amino Acid
  misc_feature (14)..(14): Xaa can be any naturally occurring amino acid
  misc_feature (16)..(16): Xaa can be any naturally occurring amino acid
CCEYCCNPAXCTXXGXCY

SEQ ID NO: 1571 - protein, 18 aa, Artificial Sequence
  Synthetically generated peptide
  VARIANT (10)..(13): Xaa = Any Amino Acid
  misc_feature (14)..(14): Xaa can be any naturally occurring amino acid
  misc_feature (17)..(17): Xaa can be any naturally occurring amino acid
CCEYCCNPAXCTXXGCXY

SEQ ID NO: 1572 - protein, 17 aa, Artificial Sequence
  Synthetically generated peptide
  VARIANT (10)..(13): Xaa = Any Amino Acid
  misc_feature (15)..(15): Xaa can be any naturally occurring amino acid
CCEYCCNPAXCTXGXCY

SEQ ID NO: 1573 - protein, 18 aa, Artificial Sequence
  Synthetically generated peptide
  VARIANT (10)..(13): Xaa = Any Amino Acid
  misc_feature (15)..(16): Xaa can be any naturally occurring amino acid
CCEYCCNPAXCTXGXXCY

SEQ ID NO: 1574 - protein, 18 aa, Artificial Sequence
  Synthetically generated peptide
  VARIANT (10)..(13): Xaa = Any Amino Acid
  misc_feature (15)..(15): Xaa can be any naturally occurring amino acid
  misc_feature (17)..(17): Xaa can be any naturally occurring amino acid
CCEYCCNPAXCTXGXCXY

SEQ ID NO: 1575 - protein, 17 aa, Artificial Sequence
  Synthetically generated peptide
  VARIANT (10)..(13): Xaa = Any Amino Acid
  misc_feature (16)..(16): Xaa can be any naturally occurring amino acid
CCEYCCNPAXCTXGCXY

SEQ ID NO: 1576 - protein, 18 aa, Artificial Sequence
  Synthetically generated peptide
  VARIANT (10)..(13): Xaa = Any Amino Acid
  misc_feature (16)..(17): Xaa can be any naturally occurring amino acid
CCEYCCNPAXCTXGCXXY

SEQ ID NO: 1577 - protein, 16 aa, Artificial Sequence
  Synthetically generated peptide
  VARIANT (10)..(14): Xaa = Any Amino Acid
CCEYCCNPAXCTGXCY

SEQ ID NO: 1578 - protein, 17 aa, Artificial Sequence
  Synthetically generated peptide
  VARIANT (10)..(14): Xaa = Any Amino Acid
  misc_feature (15)..(15): Xaa can be any naturally occurring amino acid
CCEYCCNPAXCTGXXCY

SEQ ID NO: 1579 - protein, 18 aa, Artificial Sequence
  Synthetically generated peptide
  VARIANT (10)..(14): Xaa = Any Amino Acid
  misc_feature (15)..(16): Xaa can be any naturally occurring amino acid
CCEYCCNPAXCTGXXXCY

SEQ ID NO: 1580 - protein, 18 aa, Artificial Sequence
  Synthetically generated peptide
  VARIANT (10)..(14): Xaa = Any Amino Acid
  misc_feature (15)..(15): Xaa can be any naturally occurring amino acid
  misc_feature (17)..(17): Xaa can be any naturally occurring amino acid
CCEYCCNPAXCTGXXCXY

SEQ ID NO: 1581 - protein, 17 aa, Artificial Sequence
  Synthetically generated peptide
  VARIANT (10)..(14): Xaa = Any Amino Acid
  misc_feature (16)..(16): Xaa can be any naturally occurring amino acid
CCEYCCNPAXCTGXCXY

SEQ ID NO: 1582 - protein, 18 aa, Artificial Sequence
  Synthetically generated peptide
  VARIANT (10)..(14): Xaa = Any Amino Acid
  misc_feature (16)..(17): Xaa can be any naturally occurring amino acid
CCEYCCNPAXCTGXCXXY

SEQ ID NO: 1583 - protein, 16 aa, Artificial Sequence
  Synthetically generated peptide
  VARIANT (10)..(15): Xaa = Any Amino Acid
CCEYCCNPAXCTGCXY

SEQ ID NO: 1584 - protein, 17 aa, Artificial Sequence
  Synthetically generated peptide
  VARIANT (10)..(15): Xaa = Any Amino Acid
  misc_feature (16)..(16): Xaa can be any naturally occurring amino acid
CCEYCCNPAXCTGCXXY

SEQ ID NO: 1585 - protein, 18 aa, Artificial Sequence
  Synthetically generated peptide
  VARIANT (10)..(15): Xaa = Any Amino Acid
  misc_feature (16)..(17): Xaa can be any naturally occurring amino acid
CCEYCCNPAXCTGCXXXY

SEQ ID NO: 1586 - protein, 15 aa, Artificial Sequence
  Synthetically generated peptide
  VARIANT (11)..(11): Xaa = Any Amino Acid
CCEYCCNPACXTGCY

SEQ ID NO: 1587 - protein, 16 aa, Artificial Sequence
  Synthetically generated peptide
  VARIANT (1)..(16): Xaa = Any Amino Acid
  VARIANT (11)..(12): Xaa = Any Amino Acid
CCEYCCNPACXXTGCY

SEQ ID NO: 1588 - protein, 17 aa, Artificial Sequence
  Synthetically generated peptide
  VARIANT (11)..(12): Xaa = Any Amino Acid
  misc_feature (13)..(13): Xaa can be any naturally occurring amino acid
CCEYCCNPACXXXTGCY

SEQ ID NO: 1589 - protein, 18 aa, Artificial Sequence
  Synthetically generated peptide
  VARIANT (11)..(12): Xaa = Any Amino Acid
  misc_feature (13)..(14): Xaa can be any naturally occurring amino acid
CCEYCCNPACXXXXTGCY

SEQ ID NO: 1590 - protein, 18 aa, Artificial Sequence
  Synthetically generated peptide
  VARIANT (11)..(12): Xaa = Any Amino Acid
  misc_feature (13)..(13): Xaa can be any naturally occurring amino acid
  misc_feature (15)..(15): Xaa can be any naturally occurring amino acid
CCEYCCNPACXXXTXGCY

SEQ ID NO: 1591 - protein, 18 aa, Artificial Sequence
  Synthetically generated peptide
  VARIANT (11)..(12): Xaa = Any Amino Acid
  misc_feature (13)..(13): Xaa can be any naturally occurring amino acid
  misc_feature (16)..(16): Xaa can be any naturally occurring amino acid
CCEYCCNPACXXXTGXCY

SEQ ID NO: 1592 - protein, 18 aa, Artificial Sequence
  Synthetically generated peptide
  VARIANT (11)..(12): Xaa = Any Amino Acid
  misc_feature (13)..(13): Xaa can be any naturally occurring amino acid
  misc_feature (17)..(17): Xaa can be any naturally occurring amino acid
CCEYCCNPACXXXTGCXY

SEQ ID NO: 1593 - protein, 17 aa, Artificial Sequence
  Synthetically generated peptide
  VARIANT (11)..(12): Xaa = Any Amino Acid
  misc_feature (14)..(14): Xaa can be any naturally occurring amino acid
CCEYCCNPACXXTXGCY

SEQ ID NO: 1594 - protein, 18 aa, Artificial Sequence
  Synthetically generated peptide
  VARIANT (11)..(12): Xaa = Any Amino Acid
  misc_feature (14)..(15): Xaa can be any naturally occurring amino acid
CCEYCCNPACXXTXXGCY

SEQ ID NO: 1595 - protein, 18 aa, Artificial Sequence
  Synthetically generated peptide
  VARIANT (11)..(12): Xaa = Any Amino Acid
  misc_feature (14)..(14): Xaa can be any naturally occurring amino acid
  misc_feature (16)..(16): Xaa can be any naturally occurring amino acid
CCEYCCNPACXXTXGXCY

SEQ ID NO: 1596 - protein, 18 aa, Artificial Sequence
  Synthetically generated peptide
  VARIANT (11)..(12): Xaa = Any Amino Acid
  misc_feature (14)..(14): Xaa can be any naturally occurring amino acid
  misc_feature (17)..(17): Xaa can be any naturally occurring amino acid
CCEYCCNPACXXTXGCXY

SEQ ID NO: 1597 - protein, 17 aa, Artificial Sequence
  Synthetically generated peptide
  VARIANT (11)..(12): Xaa = Any Amino Acid
  misc_feature (15)..(15): Xaa can be any naturally occurring amino acid
CCEYCCNPACXXTGXCY

SEQ ID NO: 1598 - protein, 18 aa, Artificial Sequence
  Synthetically generated peptide
  VARIANT (11)..(12): Xaa = Any Amino Acid
  misc_feature (15)..(16): Xaa can be any naturally occurring amino acid
CCEYCCNPACXXTGXXCY

SEQ ID NO: 1599 - protein, 18 aa, Artificial Sequence
  Synthetically generated peptide
  VARIANT (11)..(12): Xaa = Any Amino Acid
  misc_feature (15)..(15): Xaa can be any naturally occurring amino acid
  misc_feature (17)..(17): Xaa can be any naturally occurring amino acid
CCEYCCNPACXXTGXCXY

SEQ ID NO: 1600 - protein, 17 aa, Artificial Sequence
  Synthetically generated peptide
  VARIANT (11)..(12): Xaa = Any Amino Acid
  misc_feature (16)..(16): Xaa can be any naturally occurring amino acid
CCEYCCNPACXXTGCXY

SEQ ID NO: 1601 - protein, 18 aa, Artificial Sequence
  Synthetically generated peptide
  VARIANT (11)..(12): Xaa = Any Amino Acid
  misc_feature (16)..(17): Xaa can be any naturally occurring amino acid
CCEYCCNPACXXTGCXXY

SEQ ID NO: 1602 - protein, 16 aa, Artificial Sequence
  Synthetically generated peptide
  VARIANT (11)..(13): Xaa = Any Amino Acid
CCEYCCNPACXTXGCY

SEQ ID NO: 1603 - protein, 17 aa, Artificial Sequence
  Synthetically generated peptide
  VARIANT (11)..(13): Xaa = Any Amino Acid
  misc_feature (14)..(14): Xaa can be any naturally occurring amino acid
CCEYCCNPACXTXXGCY

SEQ ID NO: 1604 - protein, 18 aa, Artificial Sequence
  Synthetically generated peptide
  VARIANT (11)..(13): Xaa = Any Amino Acid
  misc_feature (14)..(15): Xaa can be any naturally occurring amino acid
CCEYCCNPACXTXXXGCY

SEQ ID NO: 1605 - protein, 18 aa, Artificial Sequence
  Synthetically generated peptide
  VARIANT (11)..(13): Xaa = Any Amino Acid
  misc_feature (14)..(14): Xaa can be any naturally occurring amino acid
  misc_feature (16)..(16): Xaa can be any naturally occurring amino acid
CCEYCCNPACXTXXGXCY

SEQ ID NO: 1606 - protein, 18 aa, Artificial Sequence
  Synthetically generated peptide
  VARIANT (11)..(13): Xaa = Any Amino Acid
  misc_feature (14)..(14): Xaa can be any naturally occurring amino acid
  misc_feature (17)..(17): Xaa can be any naturally occurring amino acid
CCEYCCNPACXTXXGCXY

SEQ ID NO: 1607 - protein, 17 aa, Artificial Sequence
  Synthetically generated peptide
  VARIANT (11)..(13): Xaa = Any Amino Acid
  misc_feature (15)..(15): Xaa can be any naturally occurring amino acid
CCEYCCNPACXTXGXCY

SEQ ID NO: 1608 - protein, 18 aa, Artificial Sequence
  Synthetically generated peptide
  VARIANT (11)..(13): Xaa = Any Amino Acid
  misc_feature (15)..(16): Xaa can be any naturally occurring amino acid
CCEYCCNPACXTXGXXCY

SEQ ID NO: 1609 - protein, 18 aa, Artificial Sequence
  Synthetically generated peptide
  VARIANT (11)..(13): Xaa = Any Amino Acid
  misc_feature (15)..(15): Xaa can be any naturally occurring amino acid
  misc_feature (17)..(17): Xaa can be any naturally occurring amino acid
CCEYCCNPACXTXGXCXY

SEQ ID NO: 1610 - protein, 17 aa, Artificial Sequence
  Synthetically generated peptide
  VARIANT (11)..(13): Xaa = Any Amino Acid
  misc_feature (16)..(16): Xaa can be any naturally occurring amino acid
CCEYCCNPACXTXGCXY

SEQ ID NO: 1611 - protein, 18 aa, Artificial Sequence
  Synthetically generated peptide
  VARIANT (11)..(13): Xaa = Any Amino Acid
  misc_feature (16)..(17): Xaa can be any naturally occurring amino acid
CCEYCCNPACXTXGCXXY

SEQ ID NO: 1612 - protein, 16 aa, Artificial Sequence
  Synthetically generated peptide
  VARIANT (1)..(16): Xaa = Any Amino Acid
  VARIANT (11)..(14): Xaa = Any Amino Acid
CCEYCCNPACXTGXCY

SEQ ID NO: 1613 - protein, 17 aa, Artificial Sequence
  Synthetically generated peptide
  VARIANT (11)..(14): Xaa = Any Amino Acid
  misc_feature (15)..(15): Xaa can be any naturally occurring amino acid
CCEYCCNPACXTGXXCY

SEQ ID NO: 1614 - protein, 18 aa, Artificial Sequence
  Synthetically generated peptide
  VARIANT (11)..(14): Xaa = Any Amino Acid
  misc_feature (15)..(16): Xaa can be any naturally occurring amino acid
CCEYCCNPACXTGXXXCY

SEQ ID NO: 1615 - protein, 18 aa, Artificial Sequence
  Synthetically generated peptide
  VARIANT (11)..(14): Xaa = Any Amino Acid
  misc_feature (15)..(15): Xaa can be any naturally occurring amino acid
  misc_feature (17)..(17): Xaa can be any naturally occurring amino acid
CCEYCCNPACXTGXXCXY

SEQ ID NO: 1616 - protein, 17 aa, Artificial Sequence
  Synthetically generated peptide
  VARIANT (11)..(14): Xaa = Any Amino Acid
  misc_feature (16)..(16): Xaa can be any naturally occurring amino acid
CCEYCCNPACXTGXCXY

SEQ ID NO: 1617 - protein, 18 aa, Artificial Sequence
  Synthetically generated peptide
  VARIANT (11)..(14): Xaa = Any Amino Acid
  misc_feature (16)..(17): Xaa can be any naturally occurring amino acid
CCEYCCNPACXTGXCXXY

SEQ ID NO: 1618 - protein, 16 aa, Artificial Sequence
  Synthetically generated peptide
  VARIANT (11)..(15): Xaa = Any Amino Acid
CCEYCCNPACXTGCXY

SEQ ID NO: 1619 - protein, 17 aa, Artificial Sequence
  Synthetically generated peptide
  VARIANT (11)..(15): Xaa = Any Amino Acid
  misc_feature (16)..(16): Xaa can be any naturally occurring amino acid
CCEYCCNPACXTGCXXY

SEQ ID NO: 1620 - protein, 18 aa, Artificial Sequence
  Synthetically generated peptide
  VARIANT (11)..(15): Xaa = Any Amino Acid
  misc_feature (16)..(17): Xaa can be any naturally occurring amino acid
CCEYCCNPACXTGCXXXY

SEQ ID NO: 1621 - protein, 15 aa, Artificial Sequence
  Synthetically generated peptide
  VARIANT (12)..(12): Xaa = Any Amino Acid
CCEYCCNPACTXGCY

SEQ ID NO: 1622 - protein, 16 aa, Artificial Sequence
  Synthetically generated peptide
  VARIANT (11)..(15): Xaa = Any Amino Acid
CCEYCCNPACTXXGCY

SEQ ID NO: 1623 - protein, 17 aa, Artificial Sequence
  Synthetically generated peptide
  VARIANT (12)..(13): Xaa = Any Amino Acid
  misc_feature (14)..(14): Xaa can be any naturally occurring amino acid
CCEYCCNPACTXXXGCY

SEQ ID NO: 1624 - protein, 18 aa, Artificial Sequence
  Synthetically generated peptide
  VARIANT (12)..(13): Xaa = Any Amino Acid
  misc_feature (14)..(15): Xaa can be any naturally occurring amino acid
CCEYCCNPACTXXXXGCY

SEQ ID NO: 1625 - protein, 18 aa, Artificial Sequence
  Synthetically generated peptide
  VARIANT (12)..(13): Xaa = Any Amino Acid
  misc_feature (14)..(14): Xaa can be any naturally occurring amino acid
  misc_feature (16)..(16): Xaa can be any naturally occurring amino acid
CCEYCCNPACTXXXGXCY

SEQ ID NO: 1626 - protein, 18 aa, Artificial Sequence
  Synthetically generated peptide
  VARIANT (12)..(13): Xaa = Any Amino Acid
  misc_feature (14)..(14): Xaa can be any naturally occurring amino acid
  misc_feature (17)..(17): Xaa can be any naturally occurring amino acid
CCEYCCNPACTXXXGCXY

SEQ ID NO: 1627 - protein, 17 aa, Artificial Sequence
  Synthetically generated peptide
  VARIANT (12)..(13): Xaa = Any Amino Acid
  misc_feature (15)..(15): Xaa can be any naturally occurring amino acid
CCEYCCNPACTXXGXCY

SEQ ID NO: 1628 - protein, 18 aa, Artificial Sequence
  Synthetically generated peptide
  VARIANT (12)..(13): Xaa = Any Amino Acid
  misc_feature (15)..(16): Xaa can be any naturally occurring amino acid
CCEYCCNPACTXXGXXCY

SEQ ID NO: 1629 - protein, 18 aa, Artificial Sequence
  Synthetically generated peptide
  VARIANT (12)..(13): Xaa = Any Amino Acid
  misc_feature (15)..(15): Xaa can be any naturally occurring amino acid
  misc_feature (17)..(17): Xaa can be any naturally occurring amino acid
CCEYCCNPACTXXGXCXY

SEQ ID NO: 1630 - protein, 17 aa, Artificial Sequence
  Synthetically generated peptide
  VARIANT (12)..(13): Xaa = Any Amino Acid
  misc_feature (16)..(16): Xaa can be any naturally occurring amino acid
CCEYCCNPACTXXGCXY

SEQ ID NO: 1631 - protein, 18 aa, Artificial Sequence
  Synthetically generated peptide
  VARIANT (12)..(13): Xaa = Any Amino Acid
  misc_feature (16)..(17): Xaa can be any naturally occurring amino acid
CCEYCCNPACTXXGCXXY

SEQ ID NO: 1632 - protein, 16 aa, Artificial Sequence
  Synthetically generated peptide
  VARIANT (12)..(14): Xaa = Any Amino Acid
CCEYCCNPACTXGXCY

SEQ ID NO: 1633 - protein, 17 aa, Artificial Sequence
  Synthetically generated peptide
  VARIANT (12)..(14): Xaa = Any Amino Acid
  misc_feature (15)..(15): Xaa can be any naturally occurring amino acid
CCEYCCNPACTXGXXCY

SEQ ID NO: 1634 - protein, 18 aa, Artificial Sequence
  Synthetically generated peptide
  VARIANT (12)..(14): Xaa = Any Amino Acid
  misc_feature (15)..(16): Xaa can be any naturally occurring amino acid
CCEYCCNPACTXGXXXCY

SEQ ID NO: 1635 - protein, 18 aa, Artificial Sequence
  Synthetically generated peptide
  VARIANT (12)..(14): Xaa = Any Amino Acid
  misc_feature (15)..(15): Xaa can be any naturally occurring amino acid
  misc_feature (17)..(17): Xaa can be any naturally occurring amino acid
CCEYCCNPACTXGXXCXY

SEQ ID NO: 1636 - protein, 17 aa, Artificial Sequence
  Synthetically generated peptide
  VARIANT (12)..(14): Xaa = Any Amino Acid
  misc_feature (16)..(16): Xaa can be any naturally occurring amino acid
CCEYCCNPACTXGXCXY

SEQ ID NO: 1637 - protein, 18 aa, Artificial Sequence
  Synthetically generated peptide
  VARIANT (12)..(14): Xaa = Any Amino Acid
  misc_feature (16)..(17): Xaa can be any naturally occurring amino acid
CCEYCCNPACTXGXCXXY

SEQ ID NO: 1638 - protein, 16 aa, Artificial Sequence
  Synthetically generated peptide
  VARIANT (12)..(15): Xaa = Any Amino Acid
CCEYCCNPACTXGCXY

SEQ ID NO: 1639 - protein, 17 aa, Artificial Sequence
  Synthetically generated peptide
  VARIANT (12)..(15): Xaa = Any Amino Acid
  misc_feature (16)..(16): Xaa can be any naturally occurring amino acid
CCEYCCNPACTXGCXXY

SEQ ID NO: 1640 - protein, 18 aa, Artificial Sequence
  Synthetically generated peptide
  VARIANT (12)..(15): Xaa = Any Amino Acid
  misc_feature (16)..(17): Xaa can be any naturally occurring amino acid
CCEYCCNPACTXGCXXXY

SEQ ID NO: 1641 - protein, 15 aa, Artificial Sequence
  Synthetically generated peptide
  VARIANT (1)..(15): Xaa = Any Amino Acid
  VARIANT (13)..(13): Xaa = Any Amino Acid
CCEYCCNPACTGXCY

SEQ ID NO: 1642 - protein, 16 aa, Artificial Sequence
  Synthetically generated peptide
  VARIANT (13)..(14): Xaa = Any Amino Acid
CCEYCCNPACTGXXCY

SEQ ID NO: 1643 - protein, 17 aa, Artificial Sequence
  Synthetically generated peptide
  VARIANT (13)..(14): Xaa = Any Amino Acid
  misc_feature (15)..(15): Xaa can be any naturally occurring amino acid
CCEYCCNPACTGXXXCY

SEQ ID NO: 1644 - protein, 18 aa, Artificial Sequence
  Synthetically generated peptide
  VARIANT (13)..(14): Xaa = Any Amino Acid
  misc_feature (15)..(16): Xaa can be any naturally occurring amino acid
CCEYCCNPACTGXXXXCY

SEQ ID NO: 1645 - protein, 18 aa, Artificial Sequence
  Synthetically generated peptide
  VARIANT (13)..(14): Xaa = Any Amino Acid
  misc_feature (15)..(15): Xaa can be any naturally occurring amino acid
  misc_feature (17)..(17): Xaa can be any naturally occurring amino acid
CCEYCCNPACTGXXXCXY

SEQ ID NO: 1646 - protein, 17 aa, Artificial Sequence
  Synthetically generated peptide
  VARIANT (13)..(14): Xaa = Any Amino Acid
  misc_feature (16)..(16): Xaa can be any naturally occurring amino acid
CCEYCCNPACTGXXCXY

SEQ ID NO: 1647 - protein, 18 aa, Artificial Sequence
  Synthetically generated peptide
  VARIANT (13)..(14): Xaa = Any Amino Acid
  misc_feature (16)..(17): Xaa can be any naturally occurring amino acid
CCEYCCNPACTGXXCXXY

SEQ ID NO: 1648 - protein, 16 aa, Artificial Sequence
  Synthetically generated peptide
  VARIANT (13)..(15): Xaa = Any Amino Acid
CCEYCCNPACTGXCXY

SEQ ID NO: 1649 - protein, 17 aa, Artificial Sequence
  Synthetically generated peptide
  VARIANT (13)..(15): Xaa = Any Amino Acid
  misc_feature (16)..(16): Xaa can be any naturally occurring amino acid
CCEYCCNPACTGXCXXY

SEQ ID NO: 1650 - protein, 18 aa, Artificial Sequence
  Synthetically generated peptide
  VARIANT (13)..(15): Xaa = Any Amino Acid
  misc_feature (16)..(17): Xaa can be any naturally occurring amino acid
CCEYCCNPACTGXCXXXY

SEQ ID NO: 1651 - protein, 15 aa, Artificial Sequence
  Synthetically generated peptide
  VARIANT (14)..(14): Xaa = Any Amino Acid
CCEYCCNPACTGCXY

SEQ ID NO: 1652 - protein, 16 aa, Artificial Sequence
  Synthetically generated peptide
  VARIANT (14)..(15): Xaa = Any Amino Acid
CCEYCCNPACTGCXXY

SEQ ID NO: 1653 - protein, 17 aa, Artificial Sequence
  Synthetically generated peptide
  VARIANT (14)..(15): Xaa = Any Amino Acid
  misc_feature (16)..(16): Xaa can be any naturally occurring amino acid
CCEYCCNPACTGCXXXY

SEQ ID NO: 1654 - protein, 18 aa, Artificial Sequence
  Synthetically generated peptide
  VARIANT (14)..(15): Xaa = Any Amino Acid
  misc_feature (16)..(17): Xaa can be any naturally occurring amino acid
CCEYCCNPACTGCXXXXY

SEQ ID NO: 1655 - DNA, 42 bp, Artificial Sequence
  Synthetically generated oligonucleotide
cacaccatatgaagaaatcaatattatttatttttctttctg

SEQ ID NO: 1656 - DNA, 46 bp, Artificial Sequence
  Synthetically generated oligonucleotide
cacacctcgagttaggtctccatgctttcaggaccacttttattac

SEQ ID NO: 1657 - DNA, 69 bp, Artificial Sequence
  Synthetically generated oligonucleotide
gcatgaatagtagcaattactgctgtgaattgtgttgtaatcctgcttgtaccgggtgctattaataac

SEQ ID NO: 1658 - DNA, 69 bp, Artificial Sequence
  Synthetically generated oligonucleotide
tcgagttattaatagcacccggtacaagcaggattacaacacaattcacagcagtaattgctactattc

SEQ ID NO: 1659 - DNA, 69 bp, Artificial Sequence
  Synthetically generated oligonucleotide
gcatgaatagtagcaattactgctgtgaatattgttgtaatcctgcttgtaccgggtgctattaataac

SEQ ID NO: 1660 - DNA, 69 bp, Artificial Sequence
  Synthetically generated oligonucleotide
tcgagttattaatagcacccggtacaagcaggattacaacaatattcacagcagtaattgctactattc

SEQ ID NO: 1661 - protein, 5 aa, Artificial Sequence
  Synthetically generated peptide
QHNPR

SEQ ID NO: 1662 - protein, 6 aa, Artificial Sequence
  Synthetically generated peptide
VQHNPR

SEQ ID NO: 1663 - protein, 7 aa, Artificial Sequence
  Synthetically generated peptide
VRQHNPR

SEQ ID NO: 1664 - protein, 8 aa, Artificial Sequence
  Synthetically generated peptide
VRGQHNPR

SEQ ID NO: 1665 - protein, 9 aa, Artificial Sequence
  Synthetically generated peptide
VRGPQHNPR

SEQ ID NO: 1666 - protein, 10 aa, Artificial Sequence
  Synthetically generated peptide
VRGPRQHNPR

SEQ ID NO: 1667 - protein, 11 aa, Artificial Sequence
  Synthetically generated peptide
VRGPRRQHNPR

SEQ ID NO: 1668 - protein, 6 aa, Artificial Sequence
  Synthetically generated peptide
RQHNPR

SEQ ID NO: 1669 - protein, 14 aa, Artificial Sequence
  Synthetically generated peptide
CCELCCAPACTGCY

SEQ ID NO: 1670 - protein, 14 aa, Artificial Sequence
  Synthetically generated peptide
CCELCCVPACTGCY

SEQ ID NO: 1671 - protein, 14 aa, Artificial Sequence
  Synthetically generated peptide
CCELCCLPACTGCY

SEQ ID NO: 1672 - protein, 14 aa, Artificial Sequence
  Synthetically generated peptide
CCELCCIPACTGCY

SEQ ID NO: 1673 - protein, 14 aa, Artificial Sequence
  Synthetically generated peptide
CCELCCPPACTGCY

SEQ ID NO: 1674 - protein, 14 aa, Artificial Sequence
  Synthetically generated peptide
CCELCCMPACTGCY

SEQ ID NO: 1675 - protein, 14 aa, Artificial Sequence
  Synthetically generated peptide
CCELCCFPACTGCY

SEQ ID NO: 1676 - protein, 14 aa, Artificial Sequence
  Synthetically generated peptide
CCELCCWPACTGCY

SEQ ID NO: 1677 - protein, 14 aa, Artificial Sequence
  Synthetically generated peptide
CCELCCGPACTGCY

SEQ ID NO: 1678 - protein, 14 aa, Artificial Sequence
  Synthetically generated peptide
CCELCCSPACTGCY

SEQ ID NO: 1679 - protein, 14 aa, Artificial Sequence
  Synthetically generated peptide
CCELCCTPACTGCY

SEQ ID NO: 1680 - protein, 14 aa, Artificial Sequence
  Synthetically generated peptide
CCELCCCPACTGCY

SEQ ID NO: 1681 - protein, 14 aa, Artificial Sequence
  Synthetically generated peptide
CCELCCQPACTGCY

SEQ ID NO: 1682 - protein, 14 aa, Artificial Sequence
  Synthetically generated peptide
CCELCCYPACTGCY

SEQ ID NO: 1683 - protein, 14 aa, Artificial Sequence
  Synthetically generated peptide
CCELCCDPACTGCY

SEQ ID NO: 1684 - protein, 14 aa, Artificial Sequence
  Synthetically generated peptide
CCELCCEPACTGCY

SEQ ID NO: 1685 - protein, 14 aa, Artificial Sequence
  Synthetically generated peptide
CCELCCKPACTGCY

SEQ ID NO: 1686 - protein, 14 aa, Artificial Sequence
  Synthetically generated peptide
CCELCCRPACTGCY

SEQ ID NO: 1687 - protein, 14 aa, Artificial Sequence
  Synthetically generated peptide
CCELCCHPACTGCY

SEQ ID NO: 1688 - protein, 14 aa, Artificial Sequence
  Synthetically generated peptide
CCEYCCAPACTGCY

SEQ ID NO: 1689 - protein, 14 aa, Artificial Sequence
  Synthetically generated peptide
CCEYCCVPACTGCY

SEQ ID NO: 1690 - protein, 14 aa, Artificial Sequence
  Synthetically generated peptide
CCEYCCLPACTGCY

SEQ ID NO: 1691 - protein, 14 aa, Artificial Sequence
  Synthetically generated peptide
CCEYCCIPACTGCY

SEQ ID NO: 1692 - protein, 14 aa, Artificial Sequence
  Synthetically generated peptide
CCEYCCPPACTGCY

SEQ ID NO: 1693 - protein, 14 aa, Artificial Sequence
  Synthetically generated peptide
CCEYCCMPACTGCY

SEQ ID NO: 1694 - protein, 14 aa, Artificial Sequence
  Synthetically generated peptide
CCEYCCFPACTGCY

SEQ ID NO: 1695 - protein, 14 aa, Artificial Sequence
  Synthetically generated peptide
CCEYCCWPACTGCY

SEQ ID NO: 1696 - protein, 14 aa, Artificial Sequence
  Synthetically generated peptide
CCEYCCGPACTGCY

SEQ ID NO: 1697 - protein, 14 aa, Artificial Sequence
  Synthetically generated peptide
CCEYCCSPACTGCY

SEQ ID NO: 1698 - protein, 14 aa, Artificial Sequence
  Synthetically generated peptide
CCEYCCTPACTGCY

SEQ ID NO: 1699 - protein, 14 aa, Artificial Sequence
  Synthetically generated peptide
CCEYCCCPACTGCY

SEQ ID NO: 1700 - protein, 14 aa, Artificial Sequence
  Synthetically generated peptide
CCEYCCQPACTGCY

SEQ ID NO: 1701 - protein, 14 aa, Artificial Sequence
  Synthetically generated peptide
CCEYCCYPACTGCY

SEQ ID NO: 1702 - protein, 14 aa, Artificial Sequence
  Synthetically generated peptide
CCEYCCDPACTGCY

SEQ ID NO: 1703 - protein, 14 aa, Artificial Sequence
  Synthetically generated peptide
CCEYCCEPACTGCY

SEQ ID NO: 1704 - protein, 14 aa, Artificial Sequence
  Synthetically generated peptide
CCEYCCKPACTGCY

SEQ ID NO: 1705 - protein, 14 aa, Artificial Sequence
  Synthetically generated peptide
CCEYCCRPACTGCY

SEQ ID NO: 1706 - protein, 14 aa, Artificial Sequence
  Synthetically generated peptide
CCEYCCHPACTGCY

SEQ ID NO: 1707 - protein, 13 aa, Artificial Sequence
  Synthetically generated peptide
CCELCCAPACTGC

SEQ ID NO: 1708 - protein, 13 aa, Artificial Sequence
  Synthetically generated peptide
CCELCCVPACTGC

SEQ ID NO: 1709 - protein, 13 aa, Artificial Sequence
  Synthetically generated peptide
CCELCCLPACTGC

SEQ ID NO: 1710 - protein, 13 aa, Artificial Sequence
  Synthetically generated peptide
CCELCCIPACTGC

SEQ ID NO: 1711 - protein, 13 aa, Artificial Sequence
  Synthetically generated peptide
CCELCCPPACTGC

SEQ ID NO: 1712 - protein, 13 aa, Artificial Sequence
  Synthetically generated peptide
CCELCCMPACTGC

SEQ ID NO: 1713 - protein, 13 aa, Artificial Sequence
  Synthetically generated peptide
CCELCCFPACTGC

SEQ ID NO: 1714 - protein, 13 aa, Artificial Sequence
  Synthetically generated peptide
CCELCCWPACTGC

SEQ ID NO: 1715 - protein, 13 aa, Artificial Sequence
  Synthetically generated peptide
CCELCCGPACTGC

SEQ ID NO: 1716 - protein, 13 aa, Artificial Sequence
  Synthetically generated peptide
CCELCCSPACTGC

SEQ ID NO: 1717 - protein, 13 aa, Artificial Sequence
  Synthetically generated peptide
CCELCCTPACTGC

SEQ ID NO: 1718 - protein, 13 aa, Artificial Sequence
  Synthetically generated peptide
CCELCCCPACTGC

SEQ ID NO: 1719 - protein, 13 aa, Artificial Sequence
  Synthetically generated peptide
CCELCCQPACTGC

SEQ ID NO: 1720 - protein, 13 aa, Artificial Sequence
  Synthetically generated peptide
CCELCCYPACTGC

SEQ ID NO: 1721 - protein, 13 aa, Artificial Sequence
  Synthetically generated peptide
CCELCCDPACTGC

SEQ ID NO: 1722 - protein, 13 aa, Artificial Sequence
  Synthetically generated peptide
CCELCCEPACTGC

SEQ ID NO: 1723 - protein, 13 aa, Artificial Sequence
  Synthetically generated peptide
CCELCCKPACTGC

SEQ ID NO: 1724 - protein, 13 aa, Artificial Sequence
  Synthetically generated peptide
CCELCCRPACTGC

SEQ ID NO: 1725 - protein, 13 aa, Artificial Sequence
  Synthetically generated peptide
CCELCCHPACTGC

SEQ ID NO: 1726 - protein, 13 aa, Artificial Sequence
  Synthetically generated peptide
CCEYCCAPACTGC

SEQ ID NO: 1727 - protein, 13 aa, Artificial Sequence
  Synthetically generated peptide
CCEYCCVPACTGC

SEQ ID NO: 1728 - protein, 13 aa, Artificial Sequence
  Synthetically generated peptide
CCEYCCLPACTGC

SEQ ID NO: 1729 - protein, 13 aa, Artificial Sequence
  Synthetically generated peptide
CCEYCCIPACTGC

SEQ ID NO: 1730 - protein, 13 aa, Artificial Sequence
  Synthetically generated peptide
CCEYCCPPACTGC

SEQ ID NO: 1731 - protein, 13 aa, Artificial Sequence
  Synthetically generated peptide
CCEYCCMPACTGC

SEQ ID NO: 1732 - protein, 13 aa, Artificial Sequence
  Synthetically generated peptide
CCEYCCFPACTGC

SEQ ID NO: 1733 - protein, 13 aa, Artificial Sequence
  Synthetically generated peptide
CCEYCCWPACTGC

SEQ ID NO: 1734 - protein, 13 aa, Artificial Sequence
  Synthetically generated peptide
CCEYCCGPACTGC

SEQ ID NO: 1735 - protein, 13 aa, Artificial Sequence
  Synthetically generated peptide
CCEYCCSPACTGC

SEQ ID NO: 1736 - protein, 13 aa, Artificial Sequence
  Synthetically generated peptide
CCEYCCTPACTGC

SEQ ID NO: 1737 - protein, 13 aa, Artificial Sequence
  Synthetically generated peptide
CCEYCCCPACTGC

SEQ ID NO: 1738 - protein, 13 aa, Artificial Sequence
  Synthetically generated peptide
CCEYCCQPACTGC

SEQ ID NO: 1739 - protein, 13 aa, Artificial Sequence
  Synthetically generated peptide
CCEYCCYPACTGC

SEQ ID NO: 1740 - protein, 13 aa, Artificial Sequence
  Synthetically generated peptide
CCEYCCDPACTGC

SEQ ID NO: 1741 - protein, 13 aa, Artificial Sequence
  Synthetically generated peptide
CCEYCCEPACTGC

SEQ ID NO: 1742 - protein, 13 aa, Artificial Sequence
  Synthetically generated peptide
CCEYCCKPACTGC

SEQ ID NO: 1743 - protein, 13 aa, Artificial Sequence
  Synthetically generated peptide
CCEYCCRPACTGC

SEQ ID NO: 1744 - protein, 13 aa, Artificial Sequence
  Synthetically generated peptide
CCEYCCHPACTGC

SEQ ID NO: 1745 - protein, 14 aa, Artificial Sequence
  Synthetically generated peptide
CCELCCNPTCTGCY

SEQ ID NO: 1746 - protein, 14 aa, Artificial Sequence
  Synthetically generated peptide
CCEYCCNPTCTGCY

SEQ ID NO: 1747 - protein, 13 aa, Artificial Sequence
  Synthetically generated peptide
CCELCCNPTCTGC

SEQ ID NO: 1748 - protein, 13 aa, Artificial Sequence
  Synthetically generated peptide
CCEYCCNPTCTGC

SEQ ID NO: 1749 - protein, 14 aa, Artificial Sequence
  Synthetically generated peptide
CCEFCCNPTCTGCY

SEQ ID NO: 1750 - protein, 13 aa, Artificial Sequence
  Synthetically generated peptide
CCEFCCNPTCTGC

SEQ ID NO: 1751 - protein, 14 aa, Artificial Sequence
  Synthetically generated peptide
CCEWCCNPTCTGCY

SEQ ID NO: 1752 - protein, 13 aa, Artificial Sequence
  Synthetically generated peptide
CCEWCCNPTCTGC

SEQ ID NO: 1753 - protein, 14 aa, Artificial Sequence
  Synthetically generated peptide
CCELCCNGACTGCY

SEQ ID NO: 1754 - protein, 14 aa, Artificial Sequence
  Synthetically generated peptide
CCEYCCNGACTGCY

SEQ ID NO: 1755 - protein, 13 aa, Artificial Sequence
  Synthetically generated peptide
CCELCCNGACTGC

SEQ ID NO: 1756 - protein, 13 aa, Artificial Sequence
  Synthetically generated peptide
CCEYCCNGACTGC

SEQ ID NO: 1757 - protein, 14 aa, Artificial Sequence
  Synthetically generated peptide
CCEFCCNGACTGCY

SEQ ID NO: 1758 - protein, 13 aa, Artificial Sequence
  Synthetically generated peptide
CCEFCCNGACTGC

SEQ ID NO: 1759 - protein, 14 aa, Artificial Sequence
  Synthetically generated peptide
CCEWCCNGACTGCY

SEQ ID NO: 1760 - protein, 13 aa, Artificial Sequence
  Synthetically generated peptide
CCEWCCNGACTGC

SEQ ID NO: 1761 - protein, 14 aa, Artificial Sequence
  Synthetically generated peptide
CCELCCNPACVGCY

SEQ ID NO: 1762 - protein, 14 aa, Artificial Sequence
  Synthetically generated peptide
CCEYCCNPACVGCY

SEQ ID NO: 1763 - protein, 13 aa, Artificial Sequence
  Synthetically generated peptide
CCELCCNPACVGC

SEQ ID NO: 1764 - protein, 13 aa, Artificial Sequence
  Synthetically generated peptide
CCEYCCNPACVGC

SEQ ID NO: 1765 - protein, 14 aa, Artificial Sequence
  Synthetically generated peptide
CCEFCCNPACVGCY

SEQ ID NO: 1766 - protein, 13 aa, Artificial Sequence
  Synthetically generated peptide
CCEFCCNPACVGC

SEQ ID NO: 1767 - protein, 14 aa, Artificial Sequence
  Synthetically generated peptide
CCEWCCNPACVGCY

SEQ ID NO: 1768 - protein, 13 aa, Artificial Sequence
  Synthetically generated peptide
CCEWCCNPACVGC

SEQ ID NO: 1769 - protein, 14 aa, Artificial Sequence
  Synthetically generated peptide
CCELCCNPACGGCY

SEQ ID NO: 1770 - protein, 14 aa, Artificial Sequence
  Synthetically generated peptide
CCEYCCNPACGGCY

SEQ ID NO: 1771 - protein, 13 aa, Artificial Sequence
  Synthetically generated peptide
CCELCCNPACGGC

SEQ ID NO: 1772 - protein, 13 aa, Artificial Sequence
  Synthetically generated peptide
CCEYCCNPACGGC

SEQ ID NO: 1773 - protein, 14 aa, Artificial Sequence
  Synthetically generated peptide
CCEFCCNPACGGCY

SEQ ID NO: 1774 - protein, 13 aa, Artificial Sequence
  Synthetically generated peptide
CCEFCCNPACGGC

SEQ ID NO: 1775 - protein, 14 aa, Artificial Sequence
  Synthetically generated peptide
CCEWCCNPACGGCY

SEQ ID NO: 1776 - protein, 13 aa, Artificial Sequence
  Synthetically generated peptide
CCEWCCNPACGGC

SEQ ID NO: 1777 - protein, 14 aa, Artificial Sequence
  Synthetically generated peptide
CCELCCNPACTACY

SEQ ID NO: 1778 - protein, 14 aa, Artificial Sequence
  Synthetically generated peptide
CCEYCCNPACTACY

SEQ ID NO: 1779 - protein, 13 aa, Artificial Sequence
  Synthetically generated peptide
CCELCCNPACTAC

SEQ ID NO: 1780 - protein, 13 aa, Artificial Sequence
  Synthetically generated peptide
CCEYCCNPACTAC

SEQ ID NO: 1781 - protein, 14 aa, Artificial Sequence
  Synthetically generated peptide
CCEWCCNPACTACY

SEQ ID NO: 1782 - protein, 13 aa, Artificial Sequence
  Synthetically generated peptide
CCEWCCNPACTAC

SEQ ID NO: 1783 - protein, 14 aa, Artificial Sequence
  Synthetically generated peptide
CCEFCCNPACTACY

SEQ ID NO: 1784 - protein, 13 aa, Artificial Sequence
  Synthetically generated peptide
CCEFCCNPACTAC

SEQ ID NO: 1785 - protein, 14 aa, Artificial Sequence
  Synthetically generated peptide
CCELCCNPACTGCA

SEQ ID NO: 1786 - protein, 14 aa, Artificial Sequence
  Synthetically generated peptide
CCELCCNPACTGCV

SEQ ID NO: 1787 - protein, 14 aa, Artificial Sequence
  Synthetically generated peptide
CCELCCNPACTGCL

SEQ ID NO: 1788 - protein, 14 aa, Artificial Sequence
  Synthetically generated peptide
CCELCCNPACTGCI

SEQ ID NO: 1789 - protein, 14 aa, Artificial Sequence
  Synthetically generated peptide
CCELCCNPACTGCP

SEQ ID NO: 1790 - protein, 14 aa, Artificial Sequence
  Synthetically generated peptide
CCELCCNPACTGCM

SEQ ID NO: 1791 - protein, 14 aa, Artificial Sequence
  Synthetically generated peptide
CCELCCNPACTGCF

SEQ ID NO: 1792 - protein, 14 aa, Artificial Sequence
  Synthetically generated peptide
CCELCCNPACTGCW

SEQ ID NO: 1793 - protein, 14 aa, Artificial Sequence
  Synthetically generated peptide
CCELCCNPACTGCG

SEQ ID NO: 1794 - protein, 14 aa, Artificial Sequence
  Synthetically generated peptide
CCELCCNPACTGCS

SEQ ID NO: 1795 - protein, 14 aa, Artificial Sequence
  Synthetically generated peptide
CCELCCNPACTGCT

SEQ ID NO: 1796 - protein, 14 aa, Artificial Sequence
  Synthetically generated peptide
CCELCCNPACTGCC

SEQ ID NO: 1797 - protein, 14 aa, Artificial Sequence
  Synthetically generated peptide
CCELCCNPACTGCN

SEQ ID NO: 1798 - protein, 14 aa, Artificial Sequence
  Synthetically generated peptide
CCELCCNPACTGCQ

SEQ ID NO: 1799 - protein, 14 aa, Artificial Sequence
  Synthetically generated peptide
CCELCCNPACTGCD

SEQ ID NO: 1800 - protein, 14 aa, Artificial Sequence
  Synthetically generated peptide
CCELCCNPACTGCE

SEQ ID NO: 1801 - protein, 14 aa, Artificial Sequence
  Synthetically generated peptide
CCELCCNPACTGCK

SEQ ID NO: 1802 - protein, 14 aa, Artificial Sequence
  Synthetically generated peptide
CCELCCNPACTGCR

SEQ ID NO: 1803 - protein, 14 aa, Artificial Sequence
  Synthetically generated peptide
CCELCCNPACTGCH

SEQ ID NO: 1804 - protein, 14 aa, Artificial Sequence
  Synthetically generated peptide
CCEYCCNPACTGCA

SEQ ID NO: 1805 - protein, 14 aa, Artificial Sequence
  Synthetically generated peptide
CCEYCCNPACTGCV

SEQ ID NO: 1806 - protein, 14 aa, Artificial Sequence
  Synthetically generated peptide
CCEYCCNPACTGCL

SEQ ID NO: 1807 - protein, 14 aa, Artificial Sequence
  Synthetically generated peptide
CCEYCCNPACTGCI

SEQ ID NO: 1808 - protein, 14 aa, Artificial Sequence
  Synthetically generated peptide
CCEYCCNPACTGCP

SEQ ID NO: 1809 - protein, 14 aa, Artificial Sequence
  Synthetically generated peptide
CCEYCCNPACTGCM

SEQ ID NO: 1810 - protein, 14 aa, Artificial Sequence
  Synthetically generated peptide
CCEYCCNPACTGCF

SEQ ID NO: 1811 - protein, 14 aa, Artificial Sequence
  Synthetically generated peptide
CCEYCCNPACTGCW

SEQ ID NO: 1812 - protein, 14 aa, Artificial Sequence
  Synthetically generated peptide
CCEYCCNPACTGCG

SEQ ID NO: 1813 - protein, 14 aa, Artificial Sequence
  Synthetically generated peptide
CCEYCCNPACTGCS

SEQ ID NO: 1814 - protein, 14 aa, Artificial Sequence
  Synthetically generated peptide
CCEYCCNPACTGCT

SEQ ID NO: 1815 - protein, 14 aa, Artificial Sequence
  Synthetically generated peptide
CCEYCCNPACTGCC

SEQ ID NO: 1816 - protein, 14 aa, Artificial Sequence
  Synthetically generated peptide
CCEYCCNPACTGCN

SEQ ID NO: 1817 - protein, 14 aa, Artificial Sequence
  Synthetically generated peptide
CCEYCCNPACTGCQ

SEQ ID NO: 1818 - protein, 14 aa, Artificial Sequence
  Synthetically generated peptide
CCEYCCNPACTGCD

SEQ ID NO: 1819 - protein, 14 aa, Artificial Sequence
  Synthetically generated peptide
CCEYCCNPACTGCE

SEQ ID NO: 1820 - protein, 14 aa, Artificial Sequence
  Synthetically generated peptide
CCEYCCNPACTGCK

SEQ ID NO: 1821 - protein, 14 aa, Artificial Sequence
  Synthetically generated peptide
CCEYCCNPACTGCR

SEQ ID NO: 1822 - protein, 14 aa, Artificial Sequence
  Synthetically generated peptide
CCEYCCNPACTGCH

SEQ ID NO: 1823 - protein, 14 aa, Artificial Sequence
  Synthetically generated peptide
CCALCCNPACTGCY

SEQ ID NO: 1824 - protein, 14 aa, Artificial Sequence
  Synthetically generated peptide
CCVLCCNPACTGCY

SEQ ID NO: 1825 - protein, 14 aa, Artificial Sequence
  Synthetically generated peptide
CCLLCCNPACTGCY

SEQ ID NO: 1826 - protein, 14 aa, Artificial Sequence
  Synthetically generated peptide
CCILCCNPACTGCY

SEQ ID NO: 1827 - protein, 14 aa, Artificial Sequence
  Synthetically generated peptide
CCMLCCNPACTGCY

SEQ ID NO: 1828 - protein, 14 aa, Artificial Sequence
  Synthetically generated peptide
CCFLCCNPACTGCY

SEQ ID NO: 1829 - protein, 14 aa, Artificial Sequence
  Synthetically generated peptide
CCWLCCNPACTGCY

SEQ ID NO: 1830 - protein, 14 aa, Artificial Sequence
  Synthetically generated peptide
CCGLCCNPACTGCY

SEQ ID NO: 1831 - protein, 14 aa, Artificial Sequence
  Synthetically generated peptide
CCSLCCNPACTGCY

SEQ ID NO: 1832 - protein, 14 aa, Artificial Sequence
  Synthetically generated peptide
CCTLCCNPACTGCY

SEQ ID NO: 1833 - protein, 14 aa, Artificial Sequence
  Synthetically generated peptide
CCCLCCNPACTGCY

SEQ ID NO: 1834 - protein, 14 aa, Artificial Sequence
  Synthetically generated peptide
CCNLCCNPACTGCY

SEQ ID NO: 1835 - protein, 14 aa, Artificial Sequence
  Synthetically generated peptide
CCQLCCNPACTGCY

SEQ ID NO: 1836 - protein, 14 aa, Artificial Sequence
  Synthetically generated peptide
CCYLCCNPACTGCY

SEQ ID NO: 1837 - protein, 14 aa, Artificial Sequence
  Synthetically generated peptide
CCDLCCNPACTGCY

SEQ ID NO: 1838 - protein, 14 aa, Artificial Sequence
  Synthetically generated peptide
CCKLCCNPACTGCY

SEQ ID NO: 1839 - protein, 14 aa, Artificial Sequence
  Synthetically generated peptide
CCRLCCNPACTGCY

SEQ ID NO: 1840 - protein, 14 aa, Artificial Sequence
  Synthetically generated peptide
CCHLCCNPACTGCY

SEQ ID NO: 1841 - protein, 13 aa, Artificial Sequence
  Synthetically generated peptide
CCALCCNPACTGC

SEQ ID NO: 1842 - protein, 13 aa, Artificial Sequence
  Synthetically generated peptide
CCVLCCNPACTGC

SEQ ID NO: 1843 - protein, 13 aa, Artificial Sequence
  Synthetically generated peptide
CCLLCCNPACTGC

SEQ ID NO: 1844 - protein, 13 aa, Artificial Sequence
  Synthetically generated peptide
CCILCCNPACTGC

SEQ ID NO: 1845 - protein, 13 aa, Artificial Sequence
  Synthetically generated peptide
CCMLCCNPACTGC

SEQ ID NO: 1846 - protein, 13 aa, Artificial Sequence
  Synthetically generated peptide
CCFLCCNPACTGC

SEQ ID NO: 1847 - protein, 13 aa, Artificial Sequence
  Synthetically generated peptide
CCWLCCNPACTGC

SEQ ID NO: 1848 - protein, 13 aa, Artificial Sequence
  Synthetically generated peptide
CCGLCCNPACTGC

SEQ ID NO: 1849 - protein, 13 aa, Artificial Sequence
  Synthetically generated peptide
CCSLCCNPACTGC

SEQ ID NO: 1850 - protein, 13 aa, Artificial Sequence
  Synthetically generated peptide
CCTLCCNPACTGC

SEQ ID NO: 1851 - protein, 13 aa, Artificial Sequence
  Synthetically generated peptide
CCCLCCNPACTGC

SEQ ID NO: 1852 - protein, 13 aa, Artificial Sequence
  Synthetically generated peptide
CCNLCCNPACTGC

SEQ ID NO: 1853 - protein, 13 aa, Artificial Sequence
  Synthetically generated peptide
CCQLCCNPACTGC

SEQ ID NO: 1854 - protein, 13 aa, Artificial Sequence
  Synthetically generated peptide
CCYLCCNPACTGC

SEQ ID NO: 1855 - protein, 13 aa, Artificial Sequence
  Synthetically generated peptide
CCDLCCNPACTGC

SEQ ID NO: 1856 - protein, 13 aa, Artificial Sequence
  Synthetically generated peptide
CCKLCCNPACTGC

SEQ ID NO: 1857 - protein, 13 aa, Artificial Sequence
  Synthetically generated peptide
CCRLCCNPACTGC

SEQ ID NO: 1858 - protein, 13 aa, Artificial Sequence
  Synthetically generated peptide
CCHLCCNPACTGC

SEQ ID NO: 1859 - protein, 14 aa, Artificial Sequence
  Synthetically generated peptide
CCAYCCNPACTGCY

SEQ ID NO: 1860 - protein, 14 aa, Artificial Sequence
  Synthetically generated peptide
CCVYCCNPACTGCY

SEQ ID NO: 1861 - protein, 14 aa, Artificial Sequence
  Synthetically generated peptide
CCLYCCNPACTGCY

SEQ ID NO: 1862 - protein, 14 aa, Artificial Sequence
  Synthetically generated peptide
CCIYCCNPACTGCY

SEQ ID NO: 1863 - protein, 14 aa, Artificial Sequence
  Synthetically generated peptide
CCMYCCNPACTGCY

SEQ ID NO: 1864 - protein, 14 aa, Artificial Sequence
  Synthetically generated peptide
CCFYCCNPACTGCY

SEQ ID NO: 1865 - protein, 14 aa, Artificial Sequence
  Synthetically generated peptide
CCWYCCNPACTGCY

SEQ ID NO: 1866 - protein, 14 aa, Artificial Sequence
  Synthetically generated peptide
CCGYCCNPACTGCY

SEQ ID NO: 1867 - protein, 14 aa, Artificial Sequence
  Synthetically generated peptide
CCSYCCNPACTGCY

SEQ ID NO: 1868 - protein, 14 aa, Artificial Sequence
  Synthetically generated peptide
CCTYCCNPACTGCY

SEQ ID NO: 1869 - protein, 14 aa, Artificial Sequence
  Synthetically generated peptide
CCCYCCNPACTGCY

SEQ ID NO: 1870 - protein, 14 aa, Artificial Sequence
  Synthetically generated peptide
CCNYCCNPACTGCY

SEQ ID NO: 1871 - protein, 14 aa, Artificial Sequence
  Synthetically generated peptide
CCQYCCNPACTGCY

SEQ ID NO: 1872 - protein, 14 aa, Artificial Sequence
  Synthetically generated peptide
CCYYCCNPACTGCY

SEQ ID NO: 1873 - protein, 14 aa, Artificial Sequence
  Synthetically generated peptide
CCDYCCNPACTGCY

SEQ ID NO: 1874 - protein, 14 aa, Artificial Sequence
  Synthetically generated peptide
CCKYCCNPACTGCY

SEQ ID NO: 1875 - protein, 14 aa, Artificial Sequence
  Synthetically generated peptide
CCRYCCNPACTGCY

SEQ ID NO: 1876 - protein, 14 aa, Artificial Sequence
  Synthetically generated peptide
CCHYCCNPACTGCY

SEQ ID NO: 1877 - protein, 13 aa, Artificial Sequence
  Synthetically generated peptide
CCAYCCNPACTGC

SEQ ID NO: 1878 - protein, 13 aa, Artificial Sequence
  Synthetically generated peptide
CCVYCCNPACTGC

SEQ ID NO: 1879 - protein, 13 aa, Artificial Sequence
  Synthetically generated peptide
CCLYCCNPACTGC

SEQ ID NO: 1880 - protein, 13 aa, Artificial Sequence
  Synthetically generated peptide
CCIYCCNPACTGC

SEQ ID NO: 1881 - protein, 13 aa, Artificial Sequence
  Synthetically generated peptide
CCMYCCNPACTGC

SEQ ID NO: 1882 - protein, 13 aa, Artificial Sequence
  Synthetically generated peptide
CCFYCCNPACTGC

SEQ ID NO: 1883 - protein, 13 aa, Artificial Sequence
  Synthetically generated peptide
CCWYCCNPACTGC

SEQ ID NO: 1884 - protein, 13 aa, Artificial Sequence
  Synthetically generated peptide
CCGYCCNPACTGC

SEQ ID NO: 1885 - protein, 13 aa, Artificial Sequence
  Synthetically generated peptide
CCSYCCNPACTGC

SEQ ID NO: 1886 - protein, 13 aa, Artificial Sequence
  Synthetically generated peptide
CCTYCCNPACTGC

SEQ ID NO: 1887 - protein, 13 aa, Artificial Sequence
  Synthetically generated peptide
CCCYCCNPACTGC

SEQ ID NO: 1888 - protein, 13 aa, Artificial Sequence
  Synthetically generated peptide
CCNYCCNPACTGC

SEQ ID NO: 1889 - protein, 13 aa, Artificial Sequence
  Synthetically generated peptide
CCQYCCNPACTGC

SEQ ID NO: 1890 - protein, 13 aa, Artificial Sequence
  Synthetically generated peptide
CCYYCCNPACTGC

SEQ ID NO: 1891 - protein, 13 aa, Artificial Sequence
  Synthetically generated peptide
CCDYCCNPACTGC

SEQ ID NO: 1892 - protein, 13 aa, Artificial Sequence
  Synthetically generated peptide
CCKYCCNPACTGC

SEQ ID NO: 1893 - protein, 13 aa, Artificial Sequence
  Synthetically generated peptide
CCRYCCNPACTGC

SEQ ID NO: 1894 - protein, 13 aa, Artificial Sequence
  Synthetically generated peptide
CCHYCCNPACTGC

SEQ ID NO: 1895 - protein, 14 aa, Artificial Sequence
  Synthetically generated peptide
CCEFCCAPACTGCY

SEQ ID NO: 1896 - protein, 14 aa, Artificial Sequence
  Synthetically generated peptide
CCEFCCVPACTGCY

SEQ ID NO: 1897 - protein, 14 aa, Artificial Sequence
  Synthetically generated peptide
CCEFCCLPACTGCY

SEQ ID NO: 1898 - protein, 14 aa, Artificial Sequence
  Synthetically generated peptide
CCEFCCIPACTGCY

SEQ ID NO: 1899 - protein, 14 aa, Artificial Sequence
  Synthetically generated peptide
CCEFCCPPACTGCY

SEQ ID NO: 1900 - protein, 14 aa, Artificial Sequence
  Synthetically generated peptide
CCEFCCMPACTGCY

SEQ ID NO: 1901 - protein, 14 aa, Artificial Sequence
  Synthetically generated peptide
CCEFCCFPACTGCY

SEQ ID NO: 1902 - protein, 14 aa, Artificial Sequence
  Synthetically generated peptide
CCEFCCWPACTGCY

SEQ ID NO: 1903 - protein, 14 aa, Artificial Sequence
  Synthetically generated peptide
CCEFCCGPACTGCY

SEQ ID NO: 1904 - protein, 14 aa, Artificial Sequence
  Synthetically generated peptide
CCEFCCSPACTGCY

SEQ ID NO: 1905 - protein, 14 aa, Artificial Sequence
  Synthetically generated peptide
CCEFCCTPACTGCY

SEQ ID NO: 1906 - protein, 14 aa, Artificial Sequence
  Synthetically generated peptide
CCEFCCCPACTGCY

SEQ ID NO: 1907 - protein, 14 aa, Artificial Sequence
  Synthetically generated peptide
CCEFCCQPACTGCY

SEQ ID NO: 1908 - protein, 14 aa, Artificial Sequence
  Synthetically generated peptide
CCEFCCYPACTGCY

SEQ ID NO: 1909 - protein, 14 aa, Artificial Sequence
  Synthetically generated peptide
CCEFCCDPACTGCY

SEQ ID NO: 1910 - protein, 14 aa, Artificial Sequence
  Synthetically generated peptide
CCEFCCEPACTGCY

SEQ ID NO: 1911 - protein, 14 aa, Artificial Sequence
  Synthetically generated peptide
CCEFCCKPACTGCY

SEQ ID NO: 1912 - protein, 14 aa, Artificial Sequence
  Synthetically generated peptide
CCEFCCRPACTGCY

SEQ ID NO: 1913 - protein, 14 aa, Artificial Sequence
  Synthetically generated peptide
CCEFCCHPACTGCY

SEQ ID NO: 1914 - protein, 13 aa, Artificial Sequence
  Synthetically generated peptide
CCEFCCAPACTGC

SEQ ID NO: 1915 - protein, 13 aa, Artificial Sequence
  Synthetically generated peptide
CCEFCCVPACTGC

SEQ ID NO: 1916 - protein, 13 aa, Artificial Sequence
  Synthetically generated peptide
CCEFCCLPACTGC

SEQ ID NO: 1917 - protein, 13 aa, Artificial Sequence
  Synthetically generated peptide
CCEFCCIPACTGC

SEQ ID NO: 1918 - protein, 13 aa, Artificial Sequence
  Synthetically generated peptide
CCEFCCPPACTGC

SEQ ID NO: 1919 - protein, 13 aa, Artificial Sequence
  Synthetically generated peptide
CCEFCCMPACTGC

SEQ ID NO: 1920 - protein, 13 aa, Artificial Sequence
  Synthetically generated peptide
CCEFCCFPACTGC

SEQ ID NO: 1921 - protein, 13 aa, Artificial Sequence
  Synthetically generated peptide
CCEFCCWPACTGC

SEQ ID NO: 1922 - protein, 13 aa, Artificial Sequence
  Synthetically generated peptide
CCEFCCGPACTGC

SEQ ID NO: 1923 - protein, 13 aa, Artificial Sequence
  Synthetically generated peptide
CCEFCCSPACTGC

SEQ ID NO: 1924 - protein, 13 aa, Artificial Sequence
  Synthetically generated peptide
CCEFCCTPACTGC

SEQ ID NO: 1925 - protein, 13 aa, Artificial Sequence
  Synthetically generated peptide
CCEFCCCPACTGC

SEQ ID NO: 1926 - protein, 13 aa, Artificial Sequence
  Synthetically generated peptide
CCEFCCQPACTGC

SEQ ID NO: 1927 - protein, 13 aa, Artificial Sequence
  Synthetically generated peptide
CCEFCCYPACTGC

SEQ ID NO: 1928 - protein, 13 aa, Artificial Sequence
  Synthetically generated peptide
CCEFCCDPACTGC

SEQ ID NO: 1929 - protein, 13 aa, Artificial Sequence
  Synthetically generated peptide
CCEFCCEPACTGC

SEQ ID NO: 1930 - protein, 13 aa, Artificial Sequence
  Synthetically generated peptide
CCEFCCKPACTGC

SEQ ID NO: 1931 - protein, 13 aa, Artificial Sequence
  Synthetically generated peptide
CCEFCCRPACTGC

SEQ ID NO: 1932 - protein, 13 aa, Artificial Sequence
  Synthetically generated peptide
CCEFCCHPACTGC

SEQ ID NO: 1933 - protein, 14 aa, Artificial Sequence
  Synthetically generated peptide
CCEWCCAPACTGCY

SEQ ID NO: 1934 - protein, 14 aa, Artificial Sequence
  Synthetically generated peptide
CCEWCCVPACTGCY

SEQ ID NO: 1935 - protein, 14 aa, Artificial Sequence
  Synthetically generated peptide
CCEWCCLPACTGCY

SEQ ID NO: 1936 - protein, 14 aa, Artificial Sequence
  Synthetically generated peptide
CCEWCCIPACTGCY

SEQ ID NO: 1937 - protein, 14 aa, Artificial Sequence
  Synthetically generated peptide
CCEWCCPPACTGCY

SEQ ID NO: 1938 - protein, 14 aa, Artificial Sequence
  Synthetically generated peptide
CCEWCCMPACTGCY

SEQ ID NO: 1939 - protein, 14 aa, Artificial Sequence
  Synthetically generated peptide
CCEWCCFPACTGCY

SEQ ID NO: 1940 - protein, 14 aa, Artificial Sequence
  Synthetically generated peptide
CCEWCCWPACTGCY

SEQ ID NO: 1941 - protein, 14 aa, Artificial Sequence
  Synthetically generated peptide
CCEWCCGPACTGCY

SEQ ID NO: 1942 - protein, 14 aa, Artificial Sequence
  Synthetically generated peptide
CCEWCCSPACTGCY

SEQ ID NO: 1943 - protein, 14 aa, Artificial Sequence
  Synthetically generated peptide
CCEWCCTPACTGCY

SEQ ID NO: 1944 - protein, 14 aa, Artificial Sequence
  Synthetically generated peptide
CCEWCCCPACTGCY

SEQ ID NO: 1945 - protein, 14 aa, Artificial Sequence
  Synthetically generated peptide
CCEWCCQPACTGCY

SEQ ID NO: 1946 - protein, 14 aa, Artificial Sequence
  Synthetically generated peptide
CCEWCCYPACTGCY

SEQ ID NO: 1947 - protein, 14 aa, Artificial Sequence
  Synthetically generated peptide
CCEWCCDPACTGCY

SEQ ID NO: 1948 - protein, 14 aa, Artificial Sequence
  Synthetically generated peptide
CCEWCCEPACTGCY

SEQ ID NO: 1949 - protein, 14 aa, Artificial Sequence
  Synthetically generated peptide
CCEWCCKPACTGCY

SEQ ID NO: 1950 - protein, 14 aa, Artificial Sequence
  Synthetically generated peptide
CCEWCCRPACTGCY

SEQ ID NO: 1951 - protein, 14 aa, Artificial Sequence
  Synthetically generated peptide
CCEWCCHPACTGCY

SEQ ID NO: 1952 - protein, 13 aa, Artificial Sequence
  Synthetically generated peptide
CCEWCCAPACTGC

SEQ ID NO: 1953 - protein, 13 aa, Artificial Sequence
  Synthetically generated peptide
CCEWCCVPACTGC

SEQ ID NO: 1954 - protein, 13 aa, Artificial Sequence
  Synthetically generated peptide
CCEWCCLPACTGC

SEQ ID NO: 1955 - protein, 13 aa, Artificial Sequence
  Synthetically generated peptide
CCEWCCIPACTGC

SEQ ID NO: 1956 - protein, 13 aa, Artificial Sequence
  Synthetically generated peptide
CCEWCCPPACTGC

SEQ ID NO: 1957 - protein, 13 aa, Artificial Sequence
  Synthetically generated peptide
CCEWCCMPACTGC

SEQ ID NO: 1958 - protein, 13 aa, Artificial Sequence
  Synthetically generated peptide
CCEWCCFPACTGC

SEQ ID NO: 1959 - protein, 13 aa, Artificial Sequence
  Synthetically generated peptide
CCEWCCWPACTGC

SEQ ID NO: 1960 - protein, 13 aa, Artificial Sequence
  Synthetically generated peptide
CCEWCCGPACTGC

SEQ ID NO: 1961 - protein, 13 aa, Artificial Sequence
  Synthetically generated peptide
CCEWCCSPACTGC

SEQ ID NO: 1962 - protein, 13 aa, Artificial Sequence
  Synthetically generated peptide
CCEWCCTPACTGC

SEQ ID NO: 1963 - protein, 13 aa, Artificial Sequence
  Synthetically generated peptide
CCEWCCCPACTGC

SEQ ID NO: 1964 - protein, 13 aa, Artificial Sequence
  Synthetically generated peptide
CCEWCCQPACTGC

SEQ ID NO: 1965 - protein, 13 aa, Artificial Sequence
  Synthetically generated peptide
CCEWCCYPACTGC

SEQ ID NO: 1966 - protein, 13 aa, Artificial Sequence
  Synthetically generated peptide
CCEWCCDPACTGC

SEQ ID NO: 1967 - protein, 13 aa, Artificial Sequence
  Synthetically generated peptide
CCEWCCEPACTGC

SEQ ID NO: 1968 - protein, 13 aa, Artificial Sequence
  Synthetically generated peptide
CCEWCCKPACTGC

SEQ ID NO: 1969 - protein, 13 aa, Artificial Sequence
  Synthetically generated peptide
CCEWCCRPACTGC

SEQ ID NO: 1970 - protein, 13 aa, Artificial Sequence
  Synthetically generated peptide
CCEWCCHPACTGC

SEQ ID NO: 1971 - protein, 14 aa, Artificial Sequence
  Synthetically generated peptide
CCEWCCNPACTGCA

SEQ ID NO: 1972 - protein, 14 aa, Artificial Sequence
  Synthetically generated peptide
CCEWCCNPACTGCV

SEQ ID NO: 1973 - protein, 14 aa, Artificial Sequence
  Synthetically generated peptide
CCEWCCNPACTGCL

SEQ ID NO: 1974 - protein, 14 aa, Artificial Sequence
  Synthetically generated peptide
CCEWCCNPACTGCI

SEQ ID NO: 1975 - protein, 14 aa, Artificial Sequence
  Synthetically generated peptide
CCEWCCNPACTGCP

SEQ ID NO: 1976 - protein, 14 aa, Artificial Sequence
  Synthetically generated peptide
CCEWCCNPACTGCM

SEQ ID NO: 1977 - protein, 14 aa, Artificial Sequence
  Synthetically generated peptide
CCEWCCNPACTGCF

SEQ ID NO: 1978 - protein, 14 aa, Artificial Sequence
  Synthetically generated peptide
CCEWCCNPACTGCW

SEQ ID NO: 1979 - protein, 14 aa, Artificial Sequence
  Synthetically generated peptide
CCEWCCNPACTGCG

SEQ ID NO: 1980 - protein, 14 aa, Artificial Sequence
  Synthetically generated peptide
CCEWCCNPACTGCS

SEQ ID NO: 1981 - protein, 14 aa, Artificial Sequence
  Synthetically generated peptide
CCEWCCNPACTGCT

SEQ ID NO: 1982 - protein, 14 aa, Artificial Sequence
  Synthetically generated peptide
CCEWCCNPACTGCC

SEQ ID NO: 1983 - protein, 14 aa, Artificial Sequence
  Synthetically generated peptide
CCEWCCNPACTGCN

SEQ ID NO: 1984 - protein, 14 aa, Artificial Sequence
  Synthetically generated peptide
CCEWCCNPACTGCQ

SEQ ID NO: 1985 - protein, 14 aa, Artificial Sequence
  Synthetically generated peptide
CCEWCCNPACTGCD

SEQ ID NO: 1986 - protein, 14 aa, Artificial Sequence
  Synthetically generated peptide
CCEWCCNPACTGCE

SEQ ID NO: 1987 - protein, 14 aa, Artificial Sequence
  Synthetically generated peptide
CCEWCCNPACTGCK

SEQ ID NO: 1988 - protein, 14 aa, Artificial Sequence
  Synthetically generated peptide
CCEWCCNPACTGCR

SEQ ID NO: 1989 - protein, 14 aa, Artificial Sequence
  Synthetically generated peptide
CCEWCCNPACTGCH

SEQ ID NO: 1990 - protein, 14 aa, Artificial Sequence
  Synthetically generated peptide
CCEFCCNPACTGCA

SEQ ID NO: 1991 - protein, 14 aa, Artificial Sequence
  Synthetically generated peptide
CCEFCCNPACTGCV

SEQ ID NO: 1992 - protein, 14 aa, Artificial Sequence
  Synthetically generated peptide
CCEFCCNPACTGCL

SEQ ID NO: 1993 - protein, 14 aa, Artificial Sequence
  Synthetically generated peptide
CCEFCCNPACTGCI

SEQ ID NO: 1994 - protein, 14 aa, Artificial Sequence
  Synthetically generated peptide
CCEFCCNPACTGCP

SEQ ID NO: 1995 - protein, 14 aa, Artificial Sequence
  Synthetically generated peptide
CCEFCCNPACTGCM

SEQ ID NO: 1996 - protein, 14 aa, Artificial Sequence
  Synthetically generated peptide
CCEFCCNPACTGCF

SEQ ID NO: 1997 - protein, 14 aa, Artificial Sequence
  Synthetically generated peptide
CCEFCCNPACTGCW

SEQ ID NO: 1998 - protein, 14 aa, Artificial Sequence
  Synthetically generated peptide
CCEFCCNPACTGCG

SEQ ID NO: 1999 - protein, 14 aa, Artificial Sequence
  Synthetically generated peptide
CCEFCCNPACTGCS

SEQ ID NO: 2000 - protein, 14 aa, Artificial Sequence
  Synthetically generated peptide
CCEFCCNPACTGCT

SEQ ID NO: 2001 - protein, 14 aa, Artificial Sequence
  Synthetically generated peptide
CCEFCCNPACTGCC

SEQ ID NO: 2002 - protein, 14 aa, Artificial Sequence
  Synthetically generated peptide
CCEFCCNPACTGCN

SEQ ID NO: 2003 - protein, 14 aa, Artificial Sequence
  Synthetically generated peptide
CCEFCCNPACTGCQ

SEQ ID NO: 2004 - protein, 14 aa, Artificial Sequence
  Synthetically generated peptide
CCEFCCNPACTGCD

SEQ ID NO: 2005 - protein, 14 aa, Artificial Sequence
  Synthetically generated peptide
CCEFCCNPACTGCE

SEQ ID NO: 2006 - protein, 14 aa, Artificial Sequence
  Synthetically generated peptide
CCEFCCNPACTGCK

SEQ ID NO: 2007 - protein, 14 aa, Artificial Sequence
  Synthetically generated peptide
CCEFCCNPACTGCR

SEQ ID NO: 2008 - protein, 14 aa, Artificial Sequence
  Synthetically generated peptide
CCEFCCNPACTGCH

SEQ ID NO: 2009 - protein, 14 aa, Artificial Sequence
  Synthetically generated peptide
CCAFCCNPACTGCY

SEQ ID NO: 2010 - protein, 14 aa, Artificial Sequence
  Synthetically generated peptide
CCVFCCNPACTGCY

SEQ ID NO: 2011 - protein, 14 aa, Artificial Sequence
  Synthetically generated peptide
CCLFCCNPACTGCY

SEQ ID NO: 2012 - protein, 14 aa, Artificial Sequence
  Synthetically generated peptide
CCIFCCNPACTGCY

SEQ ID NO: 2013 - protein, 14 aa, Artificial Sequence
  Synthetically generated peptide
CCMFCCNPACTGCY

SEQ ID NO: 2014 - protein, 14 aa, Artificial Sequence
  Synthetically generated peptide
CCFFCCNPACTGCY

SEQ ID NO: 2015 - protein, 14 aa, Artificial Sequence
  Synthetically generated peptide
CCWFCCNPACTGCY

SEQ ID NO: 2016 - protein, 14 aa, Artificial Sequence
  Synthetically generated peptide
CCGFCCNPACTGCY

SEQ ID NO: 2017 - protein, 14 aa, Artificial Sequence
  Synthetically generated peptide
CCSFCCNPACTGCY

SEQ ID NO: 2018 - protein, 14 aa, Artificial Sequence
  Synthetically generated peptide
CCTFCCNPACTGCY

SEQ ID NO: 2019 - protein, 14 aa, Artificial Sequence
  Synthetically generated peptide
CCCFCCNPACTGCY

SEQ ID NO: 2020 - protein, 14 aa, Artificial Sequence
  Synthetically generated peptide
CCNFCCNPACTGCY

SEQ ID NO: 2021 - protein, 14 aa, Artificial Sequence
  Synthetically generated peptide
CCQFCCNPACTGCY

SEQ ID NO: 2022 - protein, 14 aa, Artificial Sequence
  Synthetically generated peptide
CCYFCCNPACTGCY

SEQ ID NO: 2023 - protein, 14 aa, Artificial Sequence
  Synthetically generated peptide
CCDFCCNPACTGCY

SEQ ID NO: 2024 - protein, 14 aa, Artificial Sequence
  Synthetically generated peptide
CCKFCCNPACTGCY

SEQ ID NO: 2025 - protein, 14 aa, Artificial Sequence
  Synthetically generated peptide
CCRFCCNPACTGCY

SEQ ID NO: 2026 - protein, 14 aa, Artificial Sequence
  Synthetically generated peptide
CCHFCCNPACTGCY

SEQ ID NO: 2027 - protein, 13 aa, Artificial Sequence
  Synthetically generated peptide
CCAFCCNPACTGC

SEQ ID NO: 2028 - protein, 13 aa, Artificial Sequence
  Synthetically generated peptide
CCVFCCNPACTGC

SEQ ID NO: 2029 - protein, 13 aa, Artificial Sequence
  Synthetically generated peptide
CCLFCCNPACTGC

SEQ ID NO: 2030 - protein, 13 aa, Artificial Sequence
  Synthetically generated peptide
CCIFCCNPACTGC

SEQ ID NO: 2031 - protein, 13 aa, Artificial Sequence
  Synthetically generated peptide
CCMFCCNPACTGC

SEQ ID NO: 2032 - protein, 13 aa, Artificial Sequence
  Synthetically generated peptide
CCFFCCNPACTGC

SEQ ID NO: 2033 - protein, 13 aa, Artificial Sequence
  Synthetically generated peptide
CCWFCCNPACTGC

SEQ ID NO: 2034 - protein, 13 aa, Artificial Sequence
  Synthetically generated peptide
CCGFCCNPACTGC

SEQ ID NO: 2035 - protein, 13 aa, Artificial Sequence
  Synthetically generated peptide
CCSFCCNPACTGC

SEQ ID NO: 2036 - protein, 13 aa, Artificial Sequence
  Synthetically generated peptide
CCTFCCNPACTGC

SEQ ID NO: 2037 - protein, 13 aa, Artificial Sequence
  Synthetically generated peptide
CCCFCCNPACTGC

SEQ ID NO: 2038 - protein, 13 aa, Artificial Sequence
  Synthetically generated peptide
CCNFCCNPACTGC

SEQ ID NO: 2039 - protein, 13 aa, Artificial Sequence
  Synthetically generated peptide
CCQFCCNPACTGC

SEQ ID NO: 2040 - protein, 13 aa, Artificial Sequence
  Synthetically generated peptide
CCYFCCNPACTGC

SEQ ID NO: 2041 - protein, 13 aa, Artificial Sequence
  Synthetically generated peptide
CCDFCCNPACTGC

SEQ ID NO: 2042 - protein, 13 aa, Artificial Sequence
  Synthetically generated peptide
CCKFCCNPACTGC

SEQ ID NO: 2043 - protein, 13 aa, Artificial Sequence
  Synthetically generated peptide
CCRFCCNPACTGC

SEQ ID NO: 2044 - protein, 13 aa, Artificial Sequence
  Synthetically generated peptide
CCHFCCNPACTGC

SEQ ID NO: 2045 - protein, 14 aa, Artificial Sequence
  Synthetically generated peptide
CCAWCCNPACTGCY

SEQ ID NO: 2046 - protein, 14 aa, Artificial Sequence
  Synthetically generated peptide
CCVWCCNPACTGCY

SEQ ID NO: 2047 - protein, 14 aa, Artificial Sequence
  Synthetically generated peptide
CCLWCCNPACTGCY

SEQ ID NO: 2048 - protein, 14 aa, Artificial Sequence
  Synthetically generated peptide
CCIWCCNPACTGCY

SEQ ID NO: 2049 - protein, 14 aa, Artificial Sequence
  Synthetically generated peptide
CCMWCCNPACTGCY

SEQ ID NO: 2050 - protein, 14 aa, Artificial Sequence
  Synthetically generated peptide
CCFWCCNPACTGCY

SEQ ID NO: 2051 - protein, 14 aa, Artificial Sequence
  Synthetically generated peptide
CCWWCCNPACTGCY

SEQ ID NO: 2052 - protein, 14 aa, Artificial Sequence
  Synthetically generated peptide
CCGWCCNPACTGCY

SEQ ID NO: 2053 - protein, 14 aa, Artificial Sequence
  Synthetically generated peptide
CCSWCCNPACTGCY

SEQ ID NO: 2054 - protein, 14 aa, Artificial Sequence
  Synthetically generated peptide
CCTWCCNPACTGCY

SEQ ID NO: 2055 - protein, 14 aa, Artificial Sequence
  Synthetically generated peptide
CCCWCCNPACTGCY

SEQ ID NO: 2056 - protein, 14 aa, Artificial Sequence
  Synthetically generated peptide
CCNWCCNPACTGCY

SEQ ID NO: 2057 - protein, 14 aa, Artificial Sequence
  Synthetically generated peptide
CCQWCCNPACTGCY

SEQ ID NO: 2058 - protein, 14 aa, Artificial Sequence
  Synthetically generated peptide
CCYWCCNPACTGCY

SEQ ID NO: 2059 - protein, 14 aa, Artificial Sequence
  Synthetically generated peptide
CCDWCCNPACTGCY

SEQ ID NO: 2060 - protein, 14 aa, Artificial Sequence
  Synthetically generated peptide
CCKWCCNPACTGCY

SEQ ID NO: 2061 - protein, 14 aa, Artificial Sequence
  Synthetically generated peptide
CCRWCCNPACTGCY

SEQ ID NO: 2062 - protein, 14 aa, Artificial Sequence
  Synthetically generated peptide
CCHWCCNPACTGCY

SEQ ID NO: 2063 - protein, 13 aa, Artificial Sequence
  Synthetically generated peptide
CCAWCCNPACTGC

SEQ ID NO: 2064 - protein, 13 aa, Artificial Sequence
  Synthetically generated peptide
CCVWCCNPACTGC

SEQ ID NO: 2065 - protein, 13 aa, Artificial Sequence
  Synthetically generated peptide
CCLWCCNPACTGC

SEQ ID NO: 2066 - protein, 13 aa, Artificial Sequence
  Synthetically generated peptide
CCIWCCNPACTGC

SEQ ID NO: 2067 - protein, 13 aa, Artificial Sequence
  Synthetically generated peptide
CCMWCCNPACTGC

SEQ ID NO: 2068 - protein, 13 aa, Artificial Sequence
  Synthetically generated peptide
CCFWCCNPACTGC

SEQ ID NO: 2069 - protein, 13 aa, Artificial Sequence
  Synthetically generated peptide
CCWWCCNPACTGC

SEQ ID NO: 2070 - protein, 13 aa, Artificial Sequence
  Synthetically generated peptide
CCGWCCNPACTGC

SEQ ID NO: 2071 - protein, 13 aa, Artificial Sequence
  Synthetically generated peptide
CCSWCCNPACTGC

SEQ ID NO: 2072 - protein, 13 aa, Artificial Sequence
  Synthetically generated peptide
CCTWCCNPACTGC

SEQ ID NO: 2073 - protein, 13 aa, Artificial Sequence
  Synthetically generated peptide
CCCWCCNPACTGC

SEQ ID NO: 2074 - protein, 13 aa, Artificial Sequence
  Synthetically generated peptide
CCNWCCNPACTGC

SEQ ID NO: 2075 - protein, 13 aa, Artificial Sequence
  Synthetically generated peptide
CCQWCCNPACTGC

SEQ ID NO: 2076 - protein, 13 aa, Artificial Sequence
  Synthetically generated peptide
CCYWCCNPACTGC

SEQ ID NO: 2077 - protein, 13 aa, Artificial Sequence
  Synthetically generated peptide
CCDWCCNPACTGC

SEQ ID NO: 2078 - protein, 13 aa, Artificial Sequence
  Synthetically generated peptide
CCKWCCNPACTGC

SEQ ID NO: 2079 - protein, 13 aa, Artificial Sequence
  Synthetically generated peptide
CCRWCCNPACTGC

SEQ ID NO: 2080 - protein, 13 aa, Artificial Sequence
  Synthetically generated peptide
CCHWCCNPACTGC

SEQ ID NO: 2081 - protein, 20 aa, Artificial Sequence
  Synthetically generated peptide
GNLIDCCEICCNPACFGCLN

SEQ ID NO: 2082 - protein, 20 aa, Artificial Sequence
  Synthetically generated peptide
GNLIDRCEICCNPACFGCLN

SEQ ID NO: 2083 - protein, 23 aa, Artificial Sequence
  Synthetically generated peptide
PPAEVSSDWDCCDVCCNPACAGC

SEQ ID NO: 2084 - protein, 65 aa, Artificial Sequence
  Synthetically generated peptide
  VARIANT (2)..(5): Xaa = any amino acid (natural or non-natural), the same or diferent
  misc_feature (7)..(10): Xaa can be any naturally occurring amino acid
  misc_feature (12)..(15): Xaa can be any naturally occurring amino acid
  misc_feature (17)..(20): Xaa can be any naturally occurring amino acid
  misc_feature (22)..(25): Xaa can be any naturally occurring amino acid
  misc_feature (27)..(30): Xaa can be any naturally occurring amino acid
  misc_feature (32)..(35): Xaa can be any naturally occurring amino acid
  misc_feature (37)..(40): Xaa can be any naturally occurring amino acid
  misc_feature (42)..(45): Xaa can be any naturally occurring amino acid
  misc_feature (47)..(50): Xaa can be any naturally occurring amino acid
  misc_feature (52)..(55): Xaa can be any naturally occurring amino acid
  misc_feature (57)..(60): Xaa can be any naturally occurring amino acid
  misc_feature (62)..(65): Xaa can be any naturally occurring amino acid
CXXXXEXXXXYXXXXCXXXXCXXXXNXXXXPXXXXAXXXXCXXXXTXXXXGXXXXCXXXXYXXXX

SEQ ID NO: 2085 - protein, 16 aa, Artificial Sequence
  Synthetically generated peptide
NYCCELCCNPACTGCF

SEQ ID NO: 2086 - protein, 13 aa, Artificial Sequence
  Synthetically generated peptide
ACEACANPACTGC

SEQ ID NO: 2087 - protein, 13 aa, Artificial Sequence
  Synthetically generated peptide
ACERCANPACTGC

SEQ ID NO: 2088 - protein, 13 aa, Artificial Sequence
  Synthetically generated peptide
ACENCANPACTGC

SEQ ID NO: 2089 - protein, 13 aa, Artificial Sequence
  Synthetically generated peptide
ACEDCANPACTGC

SEQ ID NO: 2090 - protein, 13 aa, Artificial Sequence
  Synthetically generated peptide
ACECCANPACTGC

SEQ ID NO: 2091 - protein, 13 aa, Artificial Sequence
  Synthetically generated peptide
ACEQCANPACTGC

SEQ ID NO: 2092 - protein, 13 aa, Artificial Sequence
  Synthetically generated peptide
ACEECANPACTGC

SEQ ID NO: 2093 - protein, 13 aa, Artificial Sequence
  Synthetically generated peptide
ACEGCANPACTGC

SEQ ID NO: 2094 - protein, 13 aa, Artificial Sequence
  Synthetically generated peptide
ACEHCANPACTGC

SEQ ID NO: 2095 - protein, 13 aa, Artificial Sequence
  Synthetically generated peptide
ACEICANPACTGC

SEQ ID NO: 2096 - protein, 13 aa, Artificial Sequence
  Synthetically generated peptide
ACEKCANPACTGC

SEQ ID NO: 2097 - protein, 13 aa, Artificial Sequence
  Synthetically generated peptide
ACEMCANPACTGC

SEQ ID NO: 2098 - protein, 13 aa, Artificial Sequence
  Synthetically generated peptide
ACEFCANPACTGC

SEQ ID NO: 2099 - protein, 13 aa, Artificial Sequence
  Synthetically generated peptide
ACEPCANPACTGC

SEQ ID NO: 2100 - protein, 13 aa, Artificial Sequence
  Synthetically generated peptide
ACESCANPACTGC

SEQ ID NO: 2101 - protein, 13 aa, Artificial Sequence
  Synthetically generated peptide
ACETCANPACTGC

SEQ ID NO: 2102 - protein, 13 aa, Artificial Sequence
  Synthetically generated peptide
ACEWCANPACTGC

SEQ ID NO: 2103 - protein, 13 aa, Artificial Sequence
  Synthetically generated peptide
ACEYCANPACTGC

SEQ ID NO: 2104 - protein, 13 aa, Artificial Sequence
  Synthetically generated peptide
ACEVCANPACTGC

SEQ ID NO: 2105 - protein, 14 aa, Artificial Sequence
  Synthetically generated peptide
ACELCANPACTGCY

SEQ ID NO: 2106 - protein, 14 aa, Artificial Sequence
  Synthetically generated peptide
ACEACANPACTGCY

SEQ ID NO: 2107 - protein, 14 aa, Artificial Sequence
  Synthetically generated peptide
ACERCANPACTGCY

SEQ ID NO: 2108 - protein, 14 aa, Artificial Sequence
  Synthetically generated peptide
ACENCANPACTGCY

SEQ ID NO: 2109 - protein, 14 aa, Artificial Sequence
  Synthetically generated peptide
ACEDCANPACTGCY

SEQ ID NO: 2110 - protein, 14 aa, Artificial Sequence
  Synthetically generated peptide
ACECCANPACTGCY

SEQ ID NO: 2111 - protein, 14 aa, Artificial Sequence
  Synthetically generated peptide
ACEQCANPACTGCY

SEQ ID NO: 2112 - protein, 14 aa, Artificial Sequence
  Synthetically generated peptide
ACEECANPACTGCY

SEQ ID NO: 2113 - protein, 14 aa, Artificial Sequence
  Synthetically generated peptide
ACEGCANPACTGCY

SEQ ID NO: 2114 - protein, 14 aa, Artificial Sequence
  Synthetically generated peptide
ACEHCANPACTGCY

SEQ ID NO: 2115 - protein, 14 aa, Artificial Sequence
  Synthetically generated peptide
ACEICANPACTGCY

SEQ ID NO: 2116 - protein, 14 aa, Artificial Sequence
  Synthetically generated peptide
ACEKCANPACTGCY

SEQ ID NO: 2117 - protein, 14 aa, Artificial Sequence
  Synthetically generated peptide
ACEMCANPACTGCY

SEQ ID NO: 2118 - protein, 14 aa, Artificial Sequence
  Synthetically generated peptide
ACEFCANPACTGCY

SEQ ID NO: 2119 - protein, 14 aa, Artificial Sequence
  Synthetically generated peptide
ACEPCANPACTGCY

SEQ ID NO: 2120 - protein, 14 aa, Artificial Sequence
  Synthetically generated peptide
ACESCANPACTGCY

SEQ ID NO: 2121 - protein, 14 aa, Artificial Sequence
  Synthetically generated peptide
ACETCANPACTGCY

SEQ ID NO: 2122 - protein, 14 aa, Artificial Sequence
  Synthetically generated peptide
ACEWCANPACTGCY

SEQ ID NO: 2123 - protein, 14 aa, Artificial Sequence
  Synthetically generated peptide
ACEYCANPACTGCY

SEQ ID NO: 2124 - protein, 14 aa, Artificial Sequence
  Synthetically generated peptide
ACEVCANPACTGCY

SEQ ID NO: 2125 - protein, 13 aa, Artificial Sequence
  Synthetically generated peptide
ACELCCNPACTGC

SEQ ID NO: 2126 - protein, 13 aa, Artificial Sequence
  Synthetically generated peptide
ACEACCNPACTGC

SEQ ID NO: 2127 - protein, 13 aa, Artificial Sequence
  Synthetically generated peptide
ACERCCNPACTGC

SEQ ID NO: 2128 - protein, 13 aa, Artificial Sequence
  Synthetically generated peptide
ACENCCNPACTGC

SEQ ID NO: 2129 - protein, 13 aa, Artificial Sequence
  Synthetically generated peptide
ACEDCCNPACTGC

SEQ ID NO: 2130 - protein, 13 aa, Artificial Sequence
  Synthetically generated peptide
ACECCCNPACTGC

SEQ ID NO: 2131 - protein, 13 aa, Artificial Sequence
  Synthetically generated peptide
ACEQCCNPACTGC

SEQ ID NO: 2132 - protein, 13 aa, Artificial Sequence
  Synthetically generated peptide
ACEECCNPACTGC

SEQ ID NO: 2133 - protein, 13 aa, Artificial Sequence
  Synthetically generated peptide
ACEGCCNPACTGC

SEQ ID NO: 2134 - protein, 13 aa, Artificial Sequence
  Synthetically generated peptide
ACEHCCNPACTGC

SEQ ID NO: 2135 - protein, 13 aa, Artificial Sequence
  Synthetically generated peptide
ACEICCNPACTGC

SEQ ID NO: 2136 - protein, 13 aa, Artificial Sequence
  Synthetically generated peptide
ACEKCCNPACTGC

SEQ ID NO: 2137 - protein, 13 aa, Artificial Sequence
  Synthetically generated peptide
ACEMCCNPACTGC

SEQ ID NO: 2138 - protein, 13 aa, Artificial Sequence
  Synthetically generated peptide
ACEFCCNPACTGC

SEQ ID NO: 2139 - protein, 13 aa, Artificial Sequence
  Synthetically generated peptide
ACEPCCNPACTGC

SEQ ID NO: 2140 - protein, 13 aa, Artificial Sequence
  Synthetically generated peptide
ACESCCNPACTGC

SEQ ID NO: 2141 - protein, 13 aa, Artificial Sequence
  Synthetically generated peptide
ACETCCNPACTGC

SEQ ID NO: 2142 - protein, 13 aa, Artificial Sequence
  Synthetically generated peptide
ACEWCCNPACTGC

SEQ ID NO: 2143 - protein, 13 aa, Artificial Sequence
  Synthetically generated peptide
ACEYCCNPACTGC

SEQ ID NO: 2144 - protein, 13 aa, Artificial Sequence
  Synthetically generated peptide
ACEVCCNPACTGC

SEQ ID NO: 2145 - protein, 14 aa, Artificial Sequence
  Synthetically generated peptide
ACELCCNPACTGCY

SEQ ID NO: 2146 - protein, 14 aa, Artificial Sequence
  Synthetically generated peptide
ACEACCNPACTGCY

SEQ ID NO: 2147 - protein, 14 aa, Artificial Sequence
  Synthetically generated peptide
ACERCCNPACTGCY

SEQ ID NO: 2148 - protein, 14 aa, Artificial Sequence
  Synthetically generated peptide
ACENCCNPACTGCY

SEQ ID NO: 2149 - protein, 14 aa, Artificial Sequence
  Synthetically generated peptide
ACEDCCNPACTGCY

SEQ ID NO: 2150 - protein, 14 aa, Artificial Sequence
  Synthetically generated peptide
ACECCCNPACTGCY

SEQ ID NO: 2151 - protein, 14 aa, Artificial Sequence
  Synthetically generated peptide
ACEQCCNPACTGCY

SEQ ID NO: 2152 - protein, 14 aa, Artificial Sequence
  Synthetically generated peptide
ACEECCNPACTGCY

SEQ ID NO: 2153 - protein, 14 aa, Artificial Sequence
  Synthetically generated peptide
ACEGCCNPACTGCY

SEQ ID NO: 2154 - protein, 14 aa, Artificial Sequence
  Synthetically generated peptide
ACEHCCNPACTGCY

SEQ ID NO: 2155 - protein, 14 aa, Artificial Sequence
  Synthetically generated peptide
ACEICCNPACTGCY

SEQ ID NO: 2156 - protein, 14 aa, Artificial Sequence
  Synthetically generated peptide
ACEKCCNPACTGCY

SEQ ID NO: 2157 - protein, 14 aa, Artificial Sequence
  Synthetically generated peptide
ACEMCCNPACTGCY

SEQ ID NO: 2158 - protein, 14 aa, Artificial Sequence
  Synthetically generated peptide
ACEFCCNPACTGCY

SEQ ID NO: 2159 - protein, 14 aa, Artificial Sequence
  Synthetically generated peptide
ACEPCCNPACTGCY

SEQ ID NO: 2160 - protein, 14 aa, Artificial Sequence
  Synthetically generated peptide
ACESCCNPACTGCY

SEQ ID NO: 2161 - protein, 14 aa, Artificial Sequence
  Synthetically generated peptide
ACETCCNPACTGCY

SEQ ID NO: 2162 - protein, 14 aa, Artificial Sequence
  Synthetically generated peptide
ACEWCCNPACTGCY

SEQ ID NO: 2163 - protein, 14 aa, Artificial Sequence
  Synthetically generated peptide
ACEYCCNPACTGCY

SEQ ID NO: 2164 - protein, 14 aa, Artificial Sequence
  Synthetically generated peptide
ACEVCCNPACTGCY

SEQ ID NO: 2165 - protein, 13 aa, Artificial Sequence
  Synthetically generated peptide
CCELCANPACTGC

SEQ ID NO: 2166 - protein, 13 aa, Artificial Sequence
  Synthetically generated peptide
CCEACANPACTGC

SEQ ID NO: 2167 - protein, 13 aa, Artificial Sequence
  Synthetically generated peptide
CCERCANPACTGC

SEQ ID NO: 2168 - protein, 13 aa, Artificial Sequence
  Synthetically generated peptide
CCENCANPACTGC

SEQ ID NO: 2169 - protein, 13 aa, Artificial Sequence
  Synthetically generated peptide
CCEDCANPACTGC

SEQ ID NO: 2170 - protein, 13 aa, Artificial Sequence
  Synthetically generated peptide
CCECCANPACTGC

SEQ ID NO: 2171 - protein, 13 aa, Artificial Sequence
  Synthetically generated peptide
CCEQCANPACTGC

SEQ ID NO: 2172 - protein, 13 aa, Artificial Sequence
  Synthetically generated peptide
CCEECANPACTGC

SEQ ID NO: 2173 - protein, 13 aa, Artificial Sequence
  Synthetically generated peptide
CCEGCANPACTGC

SEQ ID NO: 2174 - protein, 13 aa, Artificial Sequence
  Synthetically generated peptide
CCEHCANPACTGC

SEQ ID NO: 2175 - protein, 13 aa, Artificial Sequence
  Synthetically generated peptide
CCEICANPACTGC

SEQ ID NO: 2176 - protein, 13 aa, Artificial Sequence
  Synthetically generated peptide
CCEKCANPACTGC

SEQ ID NO: 2177 - protein, 13 aa, Artificial Sequence
  Synthetically generated peptide
CCEMCANPACTGC

SEQ ID NO: 2178 - protein, 13 aa, Artificial Sequence
  Synthetically generated peptide
CCEFCANPACTGC

SEQ ID NO: 2179 - protein, 13 aa, Artificial Sequence
  Synthetically generated peptide
CCEPCANPACTGC

SEQ ID NO: 2180 - protein, 13 aa, Artificial Sequence
  Synthetically generated peptide
CCESCANPACTGC

SEQ ID NO: 2181 - protein, 13 aa, Artificial Sequence
  Synthetically generated peptide
CCETCANPACTGC

SEQ ID NO: 2182 - protein, 13 aa, Artificial Sequence
  Synthetically generated peptide
CCEWCANPACTGC

SEQ ID NO: 2183 - protein, 13 aa, Artificial Sequence
  Synthetically generated peptide
CCEYCANPACTGC

SEQ ID NO: 2184 - protein, 13 aa, Artificial Sequence
  Synthetically generated peptide
CCEVCANPACTGC

SEQ ID NO: 2185 - protein, 14 aa, Artificial Sequence
  Synthetically generated peptide
CCELCANPACTGCY

SEQ ID NO: 2186 - protein, 14 aa, Artificial Sequence
  Synthetically generated peptide
CCEACANPACTGCY

SEQ ID NO: 2187 - protein, 14 aa, Artificial Sequence
  Synthetically generated peptide
CCERCANPACTGCY

SEQ ID NO: 2188 - protein, 14 aa, Artificial Sequence
  Synthetically generated peptide
CCENCANPACTGCY

SEQ ID NO: 2189 - protein, 14 aa, Artificial Sequence
  Synthetically generated peptide
CCEDCANPACTGCY

SEQ ID NO: 2190 - protein, 14 aa, Artificial Sequence
  Synthetically generated peptide
CCECCANPACTGCY

SEQ ID NO: 2191 - protein, 14 aa, Artificial Sequence
  Synthetically generated peptide
CCEQCANPACTGCY

SEQ ID NO: 2192 - protein, 14 aa, Artificial Sequence
  Synthetically generated peptide
CCEECANPACTGCY

SEQ ID NO: 2193 - protein, 14 aa, Artificial Sequence
  Synthetically generated peptide
CCEGCANPACTGCY

SEQ ID NO: 2194 - protein, 14 aa, Artificial Sequence
  Synthetically generated peptide
CCEHCANPACTGCY

SEQ ID NO: 2195 - protein, 14 aa, Artificial Sequence
  Synthetically generated peptide
CCEICANPACTGCY

SEQ ID NO: 2196 - protein, 14 aa, Artificial Sequence
  Synthetically generated peptide
CCEKCANPACTGCY

SEQ ID NO: 2197 - protein, 14 aa, Artificial Sequence
  Synthetically generated peptide
CCEMCANPACTGCY

SEQ ID NO: 2198 - protein, 14 aa, Artificial Sequence
  Synthetically generated peptide
CCEFCANPACTGCY

SEQ ID NO: 2199 - protein, 14 aa, Artificial Sequence
  Synthetically generated peptide
CCEPCANPACTGCY

SEQ ID NO: 2200 - protein, 14 aa, Artificial Sequence
  Synthetically generated peptide
CCESCANPACTGCY

SEQ ID NO: 2201 - protein, 14 aa, Artificial Sequence
  Synthetically generated peptide
CCETCANPACTGCY

SEQ ID NO: 2202 - protein, 14 aa, Artificial Sequence
  Synthetically generated peptide
CCEWCANPACTGCY

SEQ ID NO: 2203 - protein, 14 aa, Artificial Sequence
  Synthetically generated peptide
CCEYCANPACTGCY

SEQ ID NO: 2204 - protein, 14 aa, Artificial Sequence
  Synthetically generated peptide
CCEVCANPACTGCY

SEQ ID NO: 2205 - protein, 13 aa, Artificial Sequence
  Synthetically generated peptide
GCELCGNPACTGC

SEQ ID NO: 2206 - protein, 13 aa, Artificial Sequence
  Synthetically generated peptide
GCEACGNPACTGC

SEQ ID NO: 2207 - protein, 13 aa, Artificial Sequence
  Synthetically generated peptide
GCERCGNPACTGC

SEQ ID NO: 2208 - protein, 13 aa, Artificial Sequence
  Synthetically generated peptide
GCENCGNPACTGC

SEQ ID NO: 2209 - protein, 13 aa, Artificial Sequence
  Synthetically generated peptide
GCEDCGNPACTGC

SEQ ID NO: 2210 - protein, 13 aa, Artificial Sequence
  Synthetically generated peptide
GCECCGNPACTGC

SEQ ID NO: 2211 - protein, 13 aa, Artificial Sequence
  Synthetically generated peptide
GCEQCGNPACTGC

SEQ ID NO: 2212 - protein, 13 aa, Artificial Sequence
  Synthetically generated peptide
GCEECGNPACTGC

SEQ ID NO: 2213 - protein, 13 aa, Artificial Sequence
  Synthetically generated peptide
GCEGCGNPACTGC

SEQ ID NO: 2214 - protein, 13 aa, Artificial Sequence
  Synthetically generated peptide
GCEHCGNPACTGC

SEQ ID NO: 2215 - protein, 13 aa, Artificial Sequence
  Synthetically generated peptide
GCEICGNPACTGC

SEQ ID NO: 2216 - protein, 13 aa, Artificial Sequence
  Synthetically generated peptide
GCEKCGNPACTGC

SEQ ID NO: 2217 - protein, 13 aa, Artificial Sequence
  Synthetically generated peptide
GCEMCGNPACTGC

SEQ ID NO: 2218 - protein, 13 aa, Artificial Sequence
  Synthetically generated peptide
GCEFCGNPACTGC

SEQ ID NO: 2219 - protein, 13 aa, Artificial Sequence
  Synthetically generated peptide
GCEPCGNPACTGC

SEQ ID NO: 2220 - protein, 13 aa, Artificial Sequence
  Synthetically generated peptide
GCESCGNPACTGC

SEQ ID NO: 2221 - protein, 13 aa, Artificial Sequence
  Synthetically generated peptide
GCETCGNPACTGC

SEQ ID NO: 2222 - protein, 13 aa, Artificial Sequence
  Synthetically generated peptide
GCEWCGNPACTGC

SEQ ID NO: 2223 - protein, 13 aa, Artificial Sequence
  Synthetically generated peptide
GCEYCGNPACTGC

SEQ ID NO: 2224 - protein, 13 aa, Artificial Sequence
  Synthetically generated peptide
GCEVCGNPACTGC

SEQ ID NO: 2225 - protein, 14 aa, Artificial Sequence
  Synthetically generated peptide
GCELCGNPACTGCY

SEQ ID NO: 2226 - protein, 14 aa, Artificial Sequence
  Synthetically generated peptide
GCEACGNPACTGCY

SEQ ID NO: 2227 - protein, 14 aa, Artificial Sequence
  Synthetically generated peptide
GCERCGNPACTGCY

SEQ ID NO: 2228 - protein, 14 aa, Artificial Sequence
  Synthetically generated peptide
GCENCGNPACTGCY

SEQ ID NO: 2229 - protein, 14 aa, Artificial Sequence
  Synthetically generated peptide
GCEDCGNPACTGCY

SEQ ID NO: 2230 - protein, 14 aa, Artificial Sequence
  Synthetically generated peptide
GCECCGNPACTGCY

SEQ ID NO: 2231 - protein, 14 aa, Artificial Sequence
  Synthetically generated peptide
GCEQCGNPACTGCY

SEQ ID NO: 2232 - protein, 14 aa, Artificial Sequence
  Synthetically generated peptide
GCEECGNPACTGCY

SEQ ID NO: 2233 - protein, 14 aa, Artificial Sequence
  Synthetically generated peptide
GCEGCGNPACTGCY

SEQ ID NO: 2234 - protein, 14 aa, Artificial Sequence
  Synthetically generated peptide
GCEHCGNPACTGCY

SEQ ID NO: 2235 - protein, 14 aa, Artificial Sequence
  Synthetically generated peptide
GCEICGNPACTGCY

SEQ ID NO: 2236 - protein, 14 aa, Artificial Sequence
  Synthetically generated peptide
GCEKCGNPACTGCY

SEQ ID NO: 2237 - protein, 14 aa, Artificial Sequence
  Synthetically generated peptide
GCEMCGNPACTGCY

SEQ ID NO: 2238 - protein, 14 aa, Artificial Sequence
  Synthetically generated peptide
GCEFCGNPACTGCY

SEQ ID NO: 2239 - protein, 14 aa, Artificial Sequence
  Synthetically generated peptide
GCEPCGNPACTGCY

SEQ ID NO: 2240 - protein, 14 aa, Artificial Sequence
  Synthetically generated peptide
GCESCGNPACTGCY

SEQ ID NO: 2241 - protein, 14 aa, Artificial Sequence
  Synthetically generated peptide
GCETCGNPACTGCY

SEQ ID NO: 2242 - protein, 14 aa, Artificial Sequence
  Synthetically generated peptide
GCEWCGNPACTGCY

SEQ ID NO: 2243 - protein, 14 aa, Artificial Sequence
  Synthetically generated peptide
GCEYCGNPACTGCY

SEQ ID NO: 2244 - protein, 14 aa, Artificial Sequence
  Synthetically generated peptide
GCEVCGNPACTGCY

SEQ ID NO: 2245 - protein, 13 aa, Artificial Sequence
  Synthetically generated peptide
GCELCCNPACTGC

SEQ ID NO: 2246 - protein, 13 aa, Artificial Sequence
  Synthetically generated peptide
GCEACCNPACTGC

SEQ ID NO: 2247 - protein, 13 aa, Artificial Sequence
  Synthetically generated peptide
GCERCCNPACTGC

SEQ ID NO: 2248 - protein, 13 aa, Artificial Sequence
  Synthetically generated peptide
GCENCCNPACTGC

SEQ ID NO: 2249 - protein, 13 aa, Artificial Sequence
  Synthetically generated peptide
GCEDCCNPACTGC

SEQ ID NO: 2250 - protein, 13 aa, Artificial Sequence
  Synthetically generated peptide
GCECCCNPACTGC

SEQ ID NO: 2251 - protein, 13 aa, Artificial Sequence
  Synthetically generated peptide
GCEQCCNPACTGC

SEQ ID NO: 2252 - protein, 13 aa, Artificial Sequence
  Synthetically generated peptide
GCEECCNPACTGC

SEQ ID NO: 2253 - protein, 13 aa, Artificial Sequence
  Synthetically generated peptide
GCEGCCNPACTGC

SEQ ID NO: 2254 - protein, 13 aa, Artificial Sequence
  Synthetically generated peptide
GCEHCCNPACTGC

SEQ ID NO: 2255 - protein, 13 aa, Artificial Sequence
  Synthetically generated peptide
GCEICCNPACTGC

SEQ ID NO: 2256 - protein, 13 aa, Artificial Sequence
  Synthetically generated peptide
GCEKCCNPACTGC

SEQ ID NO: 2257 - protein, 13 aa, Artificial Sequence
  Synthetically generated peptide
GCEMCCNPACTGC

SEQ ID NO: 2258 - protein, 13 aa, Artificial Sequence
  Synthetically generated peptide
GCEFCCNPACTGC

SEQ ID NO: 2259 - protein, 13 aa, Artificial Sequence
  Synthetically generated peptide
GCEPCCNPACTGC

SEQ ID NO: 2260 - protein, 13 aa, Artificial Sequence
  Synthetically generated peptide
GCESCCNPACTGC

SEQ ID NO: 2261 - protein, 13 aa, Artificial Sequence
  Synthetically generated peptide
GCETCCNPACTGC

SEQ ID NO: 2262 - protein, 13 aa, Artificial Sequence
  Synthetically generated peptide
GCEWCCNPACTGC

SEQ ID NO: 2263 - protein, 13 aa, Artificial Sequence
  Synthetically generated peptide
GCEYCCNPACTGC

SEQ ID NO: 2264 - protein, 13 aa, Artificial Sequence
  Synthetically generated peptide
GCEVCCNPACTGC

SEQ ID NO: 2265 - protein, 14 aa, Artificial Sequence
  Synthetically generated peptide
GCELCCNPACTGCY

SEQ ID NO: 2266 - protein, 14 aa, Artificial Sequence
  Synthetically generated peptide
GCEACCNPACTGCY

SEQ ID NO: 2267 - protein, 14 aa, Artificial Sequence
  Synthetically generated peptide
GCERCCNPACTGCY

SEQ ID NO: 2268 - protein, 14 aa, Artificial Sequence
  Synthetically generated peptide
GCENCCNPACTGCY

SEQ ID NO: 2269 - protein, 14 aa, Artificial Sequence
  Synthetically generated peptide
GCEDCCNPACTGCY

SEQ ID NO: 2270 - protein, 14 aa, Artificial Sequence
  Synthetically generated peptide
GCECCCNPACTGCY

SEQ ID NO: 2271 - protein, 14 aa, Artificial Sequence
  Synthetically generated peptide
GCEQCCNPACTGCY

SEQ ID NO: 2272 - protein, 14 aa, Artificial Sequence
  Synthetically generated peptide
GCEECCNPACTGCY

SEQ ID NO: 2273 - protein, 14 aa, Artificial Sequence
  Synthetically generated peptide
GCEGCCNPACTGCY

SEQ ID NO: 2274 - protein, 14 aa, Artificial Sequence
  Synthetically generated peptide
GCEHCCNPACTGCY

SEQ ID NO: 2275 - protein, 14 aa, Artificial Sequence
  Synthetically generated peptide
GCEICCNPACTGCY

SEQ ID NO: 2276 - protein, 14 aa, Artificial Sequence
  Synthetically generated peptide
GCEKCCNPACTGCY

SEQ ID NO: 2277 - protein, 14 aa, Artificial Sequence
  Synthetically generated peptide
GCEMCCNPACTGCY

SEQ ID NO: 2278 - protein, 14 aa, Artificial Sequence
  Synthetically generated peptide
GCEFCCNPACTGCY

SEQ ID NO: 2279 - protein, 14 aa, Artificial Sequence
  Synthetically generated peptide
GCEPCCNPACTGCY

SEQ ID NO: 2280 - protein, 14 aa, Artificial Sequence
  Synthetically generated peptide
GCESCCNPACTGCY

SEQ ID NO: 2281 - protein, 14 aa, Artificial Sequence
  Synthetically generated peptide
GCETCCNPACTGCY

SEQ ID NO: 2282 - protein, 14 aa, Artificial Sequence
  Synthetically generated peptide
GCEWCCNPACTGCY

SEQ ID NO: 2283 - protein, 14 aa, Artificial Sequence
  Synthetically generated peptide
GCEYCCNPACTGCY

SEQ ID NO: 2284 - protein, 14 aa, Artificial Sequence
  Synthetically generated peptide
GCEVCCNPACTGCY

SEQ ID NO: 2285 - protein, 13 aa, Artificial Sequence
  Synthetically generated peptide
CCELCGNPACTGC

SEQ ID NO: 2286 - protein, 13 aa, Artificial Sequence
  Synthetically generated peptide
CCEACGNPACTGC

SEQ ID NO: 2287 - protein, 13 aa, Artificial Sequence
  Synthetically generated peptide
CCERCGNPACTGC

SEQ ID NO: 2288 - protein, 13 aa, Artificial Sequence
  Synthetically generated peptide
CCENCGNPACTGC

SEQ ID NO: 2289 - protein, 13 aa, Artificial Sequence
  Synthetically generated peptide
CCEDCGNPACTGC

SEQ ID NO: 2290 - protein, 13 aa, Artificial Sequence
  Synthetically generated peptide
CCECCGNPACTGC

SEQ ID NO: 2291 - protein, 13 aa, Artificial Sequence
  Synthetically generated peptide
CCEQCGNPACTGC

SEQ ID NO: 2292 - protein, 13 aa, Artificial Sequence
  Synthetically generated peptide
CCEECGNPACTGC

SEQ ID NO: 2293 - protein, 13 aa, Artificial Sequence
  Synthetically generated peptide
CCEGCGNPACTGC

SEQ ID NO: 2294 - protein, 13 aa, Artificial Sequence
  Synthetically generated peptide
CCEHCGNPACTGC

SEQ ID NO: 2295 - protein, 13 aa, Artificial Sequence
  Synthetically generated peptide
CCEICGNPACTGC

SEQ ID NO: 2296 - protein, 13 aa, Artificial Sequence
  Synthetically generated peptide
CCEKCGNPACTGC

SEQ ID NO: 2297 - protein, 13 aa, Artificial Sequence
  Synthetically generated peptide
CCEMCGNPACTGC

SEQ ID NO: 2298 - protein, 13 aa, Artificial Sequence
  Synthetically generated peptide
CCEFCGNPACTGC

SEQ ID NO: 2299 - protein, 13 aa, Artificial Sequence
  Synthetically generated peptide
CCEPCGNPACTGC

SEQ ID NO: 2300 - protein, 13 aa, Artificial Sequence
  Synthetically generated peptide
CCESCGNPACTGC

SEQ ID NO: 2301 - protein, 13 aa, Artificial Sequence
  Synthetically generated peptide
CCETCGNPACTGC

SEQ ID NO: 2302 - protein, 13 aa, Artificial Sequence
  Synthetically generated peptide
CCEWCGNPACTGC

SEQ ID NO: 2303 - protein, 13 aa, Artificial Sequence
  Synthetically generated peptide
CCEYCGNPACTGC

SEQ ID NO: 2304 - protein, 13 aa, Artificial Sequence
  Synthetically generated peptide
CCEVCGNPACTGC

SEQ ID NO: 2305 - protein, 14 aa, Artificial Sequence
  Synthetically generated peptide
CCELCGNPACTGCY

SEQ ID NO: 2306 - protein, 14 aa, Artificial Sequence
  Synthetically generated peptide
CCEACGNPACTGCY

SEQ ID NO: 2307 - protein, 14 aa, Artificial Sequence
  Synthetically generated peptide
CCERCGNPACTGCY

SEQ ID NO: 2308 - protein, 14 aa, Artificial Sequence
  Synthetically generated peptide
CCENCGNPACTGCY

SEQ ID NO: 2309 - protein, 14 aa, Artificial Sequence
  Synthetically generated peptide
CCEDCGNPACTGCY

SEQ ID NO: 2310 - protein, 14 aa, Artificial Sequence
  Synthetically generated peptide
CCECCGNPACTGCY

SEQ ID NO: 2311 - protein, 14 aa, Artificial Sequence
  Synthetically generated peptide
CCEQCGNPACTGCY

SEQ ID NO: 2312 - protein, 14 aa, Artificial Sequence
  Synthetically generated peptide
CCEECGNPACTGCY

SEQ ID NO: 2313 - protein, 14 aa, Artificial Sequence
  Synthetically generated peptide
CCEGCGNPACTGCY

SEQ ID NO: 2314 - protein, 14 aa, Artificial Sequence
  Synthetically generated peptide
CCEHCGNPACTGCY

SEQ ID NO: 2315 - protein, 14 aa, Artificial Sequence
  Synthetically generated peptide
CCEICGNPACTGCY

SEQ ID NO: 2316 - protein, 14 aa, Artificial Sequence
  Synthetically generated peptide
CCEKCGNPACTGCY

SEQ ID NO: 2317 - protein, 14 aa, Artificial Sequence
  Synthetically generated peptide
CCEMCGNPACTGCY

SEQ ID NO: 2318 - protein, 14 aa, Artificial Sequence
  Synthetically generated peptide
CCEFCGNPACTGCY

SEQ ID NO: 2319 - protein, 14 aa, Artificial Sequence
  Synthetically generated peptide
CCEPCGNPACTGCY

SEQ ID NO: 2320 - protein, 14 aa, Artificial Sequence
  Synthetically generated peptide
CCESCGNPACTGCY

SEQ ID NO: 2321 - protein, 14 aa, Artificial Sequence
  Synthetically generated peptide
CCETCGNPACTGCY

SEQ ID NO: 2322 - protein, 14 aa, Artificial Sequence
  Synthetically generated peptide
CCEWCGNPACTGCY

SEQ ID NO: 2323 - protein, 14 aa, Artificial Sequence
  Synthetically generated peptide
CCEYCGNPACTGCY

SEQ ID NO: 2324 - protein, 14 aa, Artificial Sequence
  Synthetically generated peptide
CCEVCGNPACTGCY

SEQ ID NO: 2325 - protein, 13 aa, Artificial Sequence
  Synthetically generated peptide
ACELCGNPACTGC

SEQ ID NO: 2326 - protein, 13 aa, Artificial Sequence
  Synthetically generated peptide
ACEACGNPACTGC

SEQ ID NO: 2327 - protein, 13 aa, Artificial Sequence
  Synthetically generated peptide
ACERCGNPACTGC

SEQ ID NO: 2328 - protein, 13 aa, Artificial Sequence
  Synthetically generated peptide
ACENCGNPACTGC

SEQ ID NO: 2329 - protein, 13 aa, Artificial Sequence
  Synthetically generated peptide
ACEDCGNPACTGC

SEQ ID NO: 2330 - protein, 13 aa, Artificial Sequence
  Synthetically generated peptide
ACECCGNPACTGC

SEQ ID NO: 2331 - protein, 13 aa, Artificial Sequence
  Synthetically generated peptide
ACEQCGNPACTGC

SEQ ID NO: 2332 - protein, 13 aa, Artificial Sequence
  Synthetically generated peptide
ACEECGNPACTGC

SEQ ID NO: 2333 - protein, 13 aa, Artificial Sequence
  Synthetically generated peptide
ACEGCGNPACTGC

SEQ ID NO: 2334 - protein, 13 aa, Artificial Sequence
  Synthetically generated peptide
ACEHCGNPACTGC

SEQ ID NO: 2335 - protein, 13 aa, Artificial Sequence
  Synthetically generated peptide
ACEICGNPACTGC

SEQ ID NO: 2336 - protein, 13 aa, Artificial Sequence
  Synthetically generated peptide
ACEKCGNPACTGC

SEQ ID NO: 2337 - protein, 13 aa, Artificial Sequence
  Synthetically generated peptide
ACEMCGNPACTGC

SEQ ID NO: 2338 - protein, 13 aa, Artificial Sequence
  Synthetically generated peptide
ACEFCGNPACTGC

SEQ ID NO: 2339 - protein, 13 aa, Artificial Sequence
  Synthetically generated peptide
ACEPCGNPACTGC

SEQ ID NO: 2340 - protein, 13 aa, Artificial Sequence
  Synthetically generated peptide
ACESCGNPACTGC

SEQ ID NO: 2341 - protein, 13 aa, Artificial Sequence
  Synthetically generated peptide
ACETCGNPACTGC

SEQ ID NO: 2342 - protein, 13 aa, Artificial Sequence
  Synthetically generated peptide
ACEWCGNPACTGC

SEQ ID NO: 2343 - protein, 13 aa, Artificial Sequence
  Synthetically generated peptide
ACEYCGNPACTGC

SEQ ID NO: 2344 - protein, 13 aa, Artificial Sequence
  Synthetically generated peptide
ACEVCGNPACTGC

SEQ ID NO: 2345 - protein, 14 aa, Artificial Sequence
  Synthetically generated peptide
ACELCGNPACTGCY

SEQ ID NO: 2346 - protein, 14 aa, Artificial Sequence
  Synthetically generated peptide
ACEACGNPACTGCY

SEQ ID NO: 2347 - protein, 14 aa, Artificial Sequence
  Synthetically generated peptide
ACERCGNPACTGCY

SEQ ID NO: 2348 - protein, 14 aa, Artificial Sequence
  Synthetically generated peptide
ACENCGNPACTGCY

SEQ ID NO: 2349 - protein, 14 aa, Artificial Sequence
  Synthetically generated peptide
ACEDCGNPACTGCY

SEQ ID NO: 2350 - protein, 14 aa, Artificial Sequence
  Synthetically generated peptide
ACECCGNPACTGCY

SEQ ID NO: 2351 - protein, 14 aa, Artificial Sequence
  Synthetically generated peptide
ACEQCGNPACTGCY

SEQ ID NO: 2352 - protein, 14 aa, Artificial Sequence
  Synthetically generated peptide
ACEECGNPACTGCY

SEQ ID NO: 2353 - protein, 14 aa, Artificial Sequence
  Synthetically generated peptide
ACEGCGNPACTGCY

SEQ ID NO: 2354 - protein, 14 aa, Artificial Sequence
  Synthetically generated peptide
ACEHCGNPACTGCY

SEQ ID NO: 2355 - protein, 14 aa, Artificial Sequence
  Synthetically generated peptide
ACEICGNPACTGCY

SEQ ID NO: 2356 - protein, 14 aa, Artificial Sequence
  Synthetically generated peptide
ACEKCGNPACTGCY

SEQ ID NO: 2357 - protein, 14 aa, Artificial Sequence
  Synthetically generated peptide
ACEMCGNPACTGCY

SEQ ID NO: 2358 - protein, 14 aa, Artificial Sequence
  Synthetically generated peptide
ACEFCGNPACTGCY

SEQ ID NO: 2359 - protein, 14 aa, Artificial Sequence
  Synthetically generated peptide
ACEPCGNPACTGCY

SEQ ID NO: 2360 - protein, 14 aa, Artificial Sequence
  Synthetically generated peptide
ACESCGNPACTGCY

SEQ ID NO: 2361 - protein, 14 aa, Artificial Sequence
  Synthetically generated peptide
ACETCGNPACTGCY

SEQ ID NO: 2362 - protein, 14 aa, Artificial Sequence
  Synthetically generated peptide
ACEWCGNPACTGCY

SEQ ID NO: 2363 - protein, 14 aa, Artificial Sequence
  Synthetically generated peptide
ACEYCGNPACTGCY

SEQ ID NO: 2364 - protein, 14 aa, Artificial Sequence
  Synthetically generated peptide
ACEVCGNPACTGCY

SEQ ID NO: 2365 - protein, 13 aa, Artificial Sequence
  Synthetically generated peptide
GCELCANPACTGC

SEQ ID NO: 2366 - protein, 13 aa, Artificial Sequence
  Synthetically generated peptide
GCEACANPACTGC

SEQ ID NO: 2367 - protein, 13 aa, Artificial Sequence
  Synthetically generated peptide
GCERCANPACTGC

SEQ ID NO: 2368 - protein, 13 aa, Artificial Sequence
  Synthetically generated peptide
GCENCANPACTGC

SEQ ID NO: 2369 - protein, 13 aa, Artificial Sequence
  Synthetically generated peptide
GCEDCANPACTGC

SEQ ID NO: 2370 - protein, 13 aa, Artificial Sequence
  Synthetically generated peptide
GCECCANPACTGC

SEQ ID NO: 2371 - protein, 13 aa, Artificial Sequence
  Synthetically generated peptide
GCEQCANPACTGC

SEQ ID NO: 2372 - protein, 13 aa, Artificial Sequence
  Synthetically generated peptide
GCEECANPACTGC

SEQ ID NO: 2373 - protein, 13 aa, Artificial Sequence
  Synthetically generated peptide
GCEGCANPACTGC

SEQ ID NO: 2374 - protein, 13 aa, Artificial Sequence
  Synthetically generated peptide
GCEHCANPACTGC

SEQ ID NO: 2375 - protein, 13 aa, Artificial Sequence
  Synthetically generated peptide
GCEICANPACTGC

SEQ ID NO: 2376 - protein, 13 aa, Artificial Sequence
  Synthetically generated peptide
GCEKCANPACTGC

SEQ ID NO: 2377 - protein, 13 aa, Artificial Sequence
  Synthetically generated peptide
GCEMCANPACTGC

SEQ ID NO: 2378 - protein, 13 aa, Artificial Sequence
  Synthetically generated peptide
GCEFCANPACTGC

SEQ ID NO: 2379 - protein, 13 aa, Artificial Sequence
  Synthetically generated peptide
GCEPCANPACTGC

SEQ ID NO: 2380 - protein, 13 aa, Artificial Sequence
  Synthetically generated peptide
GCESCANPACTGC

SEQ ID NO: 2381 - protein, 13 aa, Artificial Sequence
  Synthetically generated peptide
GCETCANPACTGC

SEQ ID NO: 2382 - protein, 13 aa, Artificial Sequence
  Synthetically generated peptide
GCEWCANPACTGC

SEQ ID NO: 2383 - protein, 13 aa, Artificial Sequence
  Synthetically generated peptide
GCEYCANPACTGC

SEQ ID NO: 2384 - protein, 13 aa, Artificial Sequence
  Synthetically generated peptide
GCEVCANPACTGC

SEQ ID NO: 2385 - protein, 14 aa, Artificial Sequence
  Synthetically generated peptide
GCELCANPACTGCY

SEQ ID NO: 2386 - protein, 14 aa, Artificial Sequence
  Synthetically generated peptide
GCEACANPACTGCY

SEQ ID NO: 2387 - protein, 14 aa, Artificial Sequence
  Synthetically generated peptide
GCERCANPACTGCY

SEQ ID NO: 2388 - protein, 14 aa, Artificial Sequence
  Synthetically generated peptide
GCENCANPACTGCY

SEQ ID NO: 2389 - protein, 14 aa, Artificial Sequence
  Synthetically generated peptide
GCEDCANPACTGCY

SEQ ID NO: 2390 - protein, 14 aa, Artificial Sequence
  Synthetically generated peptide
GCECCANPACTGCY

SEQ ID NO: 2391 - protein, 14 aa, Artificial Sequence
  Synthetically generated peptide
GCEQCANPACTGCY

SEQ ID NO: 2392 - protein, 14 aa, Artificial Sequence
  Synthetically generated peptide
GCEECANPACTGCY

SEQ ID NO: 2393 - protein, 14 aa, Artificial Sequence
  Synthetically generated peptide
GCEGCANPACTGCY

SEQ ID NO: 2394 - protein, 14 aa, Artificial Sequence
  Synthetically generated peptide
GCEHCANPACTGCY

SEQ ID NO: 2395 - protein, 14 aa, Artificial Sequence
  Synthetically generated peptide
GCEICANPACTGCY

SEQ ID NO: 2396 - protein, 14 aa, Artificial Sequence
  Synthetically generated peptide
GCEKCANPACTGCY

SEQ ID NO: 2397 - protein, 14 aa, Artificial Sequence
  Synthetically generated peptide
GCEMCANPACTGCY

SEQ ID NO: 2398 - protein, 14 aa, Artificial Sequence
  Synthetically generated peptide
GCEFCANPACTGCY

SEQ ID NO: 2399 - protein, 14 aa, Artificial Sequence
  Synthetically generated peptide
GCEPCANPACTGCY

SEQ ID NO: 2400 - protein, 14 aa, Artificial Sequence
  Synthetically generated peptide
GCESCANPACTGCY

SEQ ID NO: 2401 - protein, 14 aa, Artificial Sequence
  Synthetically generated peptide
GCETCANPACTGCY

SEQ ID NO: 2402 - protein, 14 aa, Artificial Sequence
  Synthetically generated peptide
GCEWCANPACTGCY

SEQ ID NO: 2403 - protein, 14 aa, Artificial Sequence
  Synthetically generated peptide
GCEYCANPACTGCY

SEQ ID NO: 2404 - protein, 14 aa, Artificial Sequence
  Synthetically generated peptide
GCEVCANPACTGCY

SEQ ID NO: 2405 - protein, 13 aa, Artificial Sequence
  Synthetically generated peptide
CCEAACNPACTGA

SEQ ID NO: 2406 - protein, 13 aa, Artificial Sequence
  Synthetically generated peptide
CCERACNPACTGA

SEQ ID NO: 2407 - protein, 13 aa, Artificial Sequence
  Synthetically generated peptide
CCENACNPACTGA

SEQ ID NO: 2408 - protein, 13 aa, Artificial Sequence
  Synthetically generated peptide
CCEDACNPACTGA

SEQ ID NO: 2409 - protein, 13 aa, Artificial Sequence
  Synthetically generated peptide
CCECACNPACTGA

SEQ ID NO: 2410 - protein, 13 aa, Artificial Sequence
  Synthetically generated peptide
CCEQACNPACTGA

SEQ ID NO: 2411 - protein, 13 aa, Artificial Sequence
  Synthetically generated peptide
CCEEACNPACTGA

SEQ ID NO: 2412 - protein, 13 aa, Artificial Sequence
  Synthetically generated peptide
CCEGACNPACTGA

SEQ ID NO: 2413 - protein, 13 aa, Artificial Sequence
  Synthetically generated peptide
CCEHACNPACTGA

SEQ ID NO: 2414 - protein, 13 aa, Artificial Sequence
  Synthetically generated peptide
CCEIACNPACTGA

SEQ ID NO: 2415 - protein, 13 aa, Artificial Sequence
  Synthetically generated peptide
CCEKACNPACTGA

SEQ ID NO: 2416 - protein, 13 aa, Artificial Sequence
  Synthetically generated peptide
CCEMACNPACTGA

SEQ ID NO: 2417 - protein, 13 aa, Artificial Sequence
  Synthetically generated peptide
CCEFACNPACTGA

SEQ ID NO: 2418 - protein, 13 aa, Artificial Sequence
  Synthetically generated peptide
CCEPACNPACTGA

SEQ ID NO: 2419 - protein, 13 aa, Artificial Sequence
  Synthetically generated peptide
CCESACNPACTGA

SEQ ID NO: 2420 - protein, 13 aa, Artificial Sequence
  Synthetically generated peptide
CCETACNPACTGA

SEQ ID NO: 2421 - protein, 13 aa, Artificial Sequence
  Synthetically generated peptide
CCEWACNPACTGA

SEQ ID NO: 2422 - protein, 13 aa, Artificial Sequence
  Synthetically generated peptide
CCEYACNPACTGA

SEQ ID NO: 2423 - protein, 13 aa, Artificial Sequence
  Synthetically generated peptide
CCEVACNPACTGA

SEQ ID NO: 2424 - protein, 14 aa, Artificial Sequence
  Synthetically generated peptide
CCELACNPACTGAY

SEQ ID NO: 2425 - protein, 14 aa, Artificial Sequence
  Synthetically generated peptide
CCEAACNPACTGAY

SEQ ID NO: 2426 - protein, 14 aa, Artificial Sequence
  Synthetically generated peptide
CCERACNPACTGAY

SEQ ID NO: 2427 - protein, 14 aa, Artificial Sequence
  Synthetically generated peptide
CCENACNPACTGAY

SEQ ID NO: 2428 - protein, 14 aa, Artificial Sequence
  Synthetically generated peptide
CCEDACNPACTGAY

SEQ ID NO: 2429 - protein, 14 aa, Artificial Sequence
  Synthetically generated peptide
CCECACNPACTGAY

SEQ ID NO: 2430 - protein, 14 aa, Artificial Sequence
  Synthetically generated peptide
CCEQACNPACTGAY

SEQ ID NO: 2431 - protein, 14 aa, Artificial Sequence
  Synthetically generated peptide
CCEEACNPACTGAY

SEQ ID NO: 2432 - protein, 14 aa, Artificial Sequence
  Synthetically generated peptide
CCEGACNPACTGAY

SEQ ID NO: 2433 - protein, 14 aa, Artificial Sequence
  Synthetically generated peptide
CCEHACNPACTGAY

SEQ ID NO: 2434 - protein, 14 aa, Artificial Sequence
  Synthetically generated peptide
CCEIACNPACTGAY

SEQ ID NO: 2435 - protein, 14 aa, Artificial Sequence
  Synthetically generated peptide
CCEKACNPACTGAY

SEQ ID NO: 2436 - protein, 14 aa, Artificial Sequence
  Synthetically generated peptide
CCEMACNPACTGAY

SEQ ID NO: 2437 - protein, 14 aa, Artificial Sequence
  Synthetically generated peptide
CCEFACNPACTGAY

SEQ ID NO: 2438 - protein, 14 aa, Artificial Sequence
  Synthetically generated peptide
CCEPACNPACTGAY

SEQ ID NO: 2439 - protein, 14 aa, Artificial Sequence
  Synthetically generated peptide
CCESACNPACTGAY

SEQ ID NO: 2440 - protein, 14 aa, Artificial Sequence
  Synthetically generated peptide
CCETACNPACTGAY

SEQ ID NO: 2441 - protein, 14 aa, Artificial Sequence
  Synthetically generated peptide
CCEWACNPACTGAY

SEQ ID NO: 2442 - protein, 14 aa, Artificial Sequence
  Synthetically generated peptide
CCEYACNPACTGAY

SEQ ID NO: 2443 - protein, 14 aa, Artificial Sequence
  Synthetically generated peptide
CCEVACNPACTGAY

SEQ ID NO: 2444 - protein, 13 aa, Artificial Sequence
  Synthetically generated peptide
CCELACNPACTGC

SEQ ID NO: 2445 - protein, 13 aa, Artificial Sequence
  Synthetically generated peptide
CCEAACNPACTGC

SEQ ID NO: 2446 - protein, 13 aa, Artificial Sequence
  Synthetically generated peptide
CCERACNPACTGC

SEQ ID NO: 2447 - protein, 13 aa, Artificial Sequence
  Synthetically generated peptide
CCENACNPACTGC

SEQ ID NO: 2448 - protein, 13 aa, Artificial Sequence
  Synthetically generated peptide
CCEDACNPACTGC

SEQ ID NO: 2449 - protein, 13 aa, Artificial Sequence
  Synthetically generated peptide
CCECACNPACTGC

SEQ ID NO: 2450 - protein, 13 aa, Artificial Sequence
  Synthetically generated peptide
CCEQACNPACTGC

SEQ ID NO: 2451 - protein, 13 aa, Artificial Sequence
  Synthetically generated peptide
CCEEACNPACTGC

SEQ ID NO: 2452 - protein, 13 aa, Artificial Sequence
  Synthetically generated peptide
CCEGACNPACTGC

SEQ ID NO: 2453 - protein, 13 aa, Artificial Sequence
  Synthetically generated peptide
CCEHACNPACTGC

SEQ ID NO: 2454 - protein, 13 aa, Artificial Sequence
  Synthetically generated peptide
CCEIACNPACTGC

SEQ ID NO: 2455 - protein, 13 aa, Artificial Sequence
  Synthetically generated peptide
CCEKACNPACTGC

SEQ ID NO: 2456 - protein, 13 aa, Artificial Sequence
  Synthetically generated peptide
CCEMACNPACTGC

SEQ ID NO: 2457 - protein, 13 aa, Artificial Sequence
  Synthetically generated peptide
CCEFACNPACTGC

SEQ ID NO: 2458 - protein, 13 aa, Artificial Sequence
  Synthetically generated peptide
CCEPACNPACTGC

SEQ ID NO: 2459 - protein, 13 aa, Artificial Sequence
  Synthetically generated peptide
CCESACNPACTGC

SEQ ID NO: 2460 - protein, 13 aa, Artificial Sequence
  Synthetically generated peptide
CCETACNPACTGC

SEQ ID NO: 2461 - protein, 13 aa, Artificial Sequence
  Synthetically generated peptide
CCEWACNPACTGC

SEQ ID NO: 2462 - protein, 13 aa, Artificial Sequence
  Synthetically generated peptide
CCEYACNPACTGC

SEQ ID NO: 2463 - protein, 13 aa, Artificial Sequence
  Synthetically generated peptide
CCEVACNPACTGC

SEQ ID NO: 2464 - protein, 14 aa, Artificial Sequence
  Synthetically generated peptide
CCELACNPACTGCY

SEQ ID NO: 2465 - protein, 14 aa, Artificial Sequence
  Synthetically generated peptide
CCEAACNPACTGCY

SEQ ID NO: 2466 - protein, 14 aa, Artificial Sequence
  Synthetically generated peptide
CCERACNPACTGCY

SEQ ID NO: 2467 - protein, 14 aa, Artificial Sequence
  Synthetically generated peptide
CCENACNPACTGCY

SEQ ID NO: 2468 - protein, 14 aa, Artificial Sequence
  Synthetically generated peptide
CCEDACNPACTGCY

SEQ ID NO: 2469 - protein, 14 aa, Artificial Sequence
  Synthetically generated peptide
CCECACNPACTGCY

SEQ ID NO: 2470 - protein, 14 aa, Artificial Sequence
  Synthetically generated peptide
CCEQACNPACTGCY

SEQ ID NO: 2471 - protein, 14 aa, Artificial Sequence
  Synthetically generated peptide
CCEEACNPACTGCY

SEQ ID NO: 2472 - protein, 14 aa, Artificial Sequence
  Synthetically generated peptide
CCEGACNPACTGCY

SEQ ID NO: 2473 - protein, 14 aa, Artificial Sequence
  Synthetically generated peptide
CCEHACNPACTGCY

SEQ ID NO: 2474 - protein, 14 aa, Artificial Sequence
  Synthetically generated peptide
CCEIACNPACTGCY

SEQ ID NO: 2475 - protein, 14 aa, Artificial Sequence
  Synthetically generated peptide
CCEKACNPACTGCY

SEQ ID NO: 2476 - protein, 14 aa, Artificial Sequence
  Synthetically generated peptide
CCEMACNPACTGCY

SEQ ID NO: 2477 - protein, 14 aa, Artificial Sequence
  Synthetically generated peptide
CCEFACNPACTGCY

SEQ ID NO: 2478 - protein, 14 aa, Artificial Sequence
  Synthetically generated peptide
CCEPACNPACTGCY

SEQ ID NO: 2479 - protein, 14 aa, Artificial Sequence
  Synthetically generated peptide
CCESACNPACTGCY

SEQ ID NO: 2480 - protein, 14 aa, Artificial Sequence
  Synthetically generated peptide
CCETACNPACTGCY

SEQ ID NO: 2481 - protein, 14 aa, Artificial Sequence
  Synthetically generated peptide
CCEWACNPACTGCY

SEQ ID NO: 2482 - protein, 14 aa, Artificial Sequence
  Synthetically generated peptide
CCEYACNPACTGCY

SEQ ID NO: 2483 - protein, 13 aa, Artificial Sequence
  Synthetically generated peptide
CCELCCNPACTGA

SEQ ID NO: 2484 - protein, 13 aa, Artificial Sequence
  Synthetically generated peptide
CCEACCNPACTGA

SEQ ID NO: 2485 - protein, 13 aa, Artificial Sequence
  Synthetically generated peptide
CCERCCNPACTGA

SEQ ID NO: 2486 - protein, 13 aa, Artificial Sequence
  Synthetically generated peptide
CCENCCNPACTGA

SEQ ID NO: 2487 - protein, 13 aa, Artificial Sequence
  Synthetically generated peptide
CCEDCCNPACTGA

SEQ ID NO: 2488 - protein, 13 aa, Artificial Sequence
  Synthetically generated peptide
CCECCCNPACTGA

SEQ ID NO: 2489 - protein, 13 aa, Artificial Sequence
  Synthetically generated peptide
CCEQCCNPACTGA

SEQ ID NO: 2490 - protein, 13 aa, Artificial Sequence
  Synthetically generated peptide
CCEECCNPACTGA

SEQ ID NO: 2491 - protein, 13 aa, Artificial Sequence
  Synthetically generated peptide
CCEGCCNPACTGA

SEQ ID NO: 2492 - protein, 13 aa, Artificial Sequence
  Synthetically generated peptide
CCEHCCNPACTGA

SEQ ID NO: 2493 - protein, 13 aa, Artificial Sequence
  Synthetically generated peptide
CCEICCNPACTGA

SEQ ID NO: 2494 - protein, 13 aa, Artificial Sequence
  Synthetically generated peptide
CCEKCCNPACTGA

SEQ ID NO: 2495 - protein, 13 aa, Artificial Sequence
  Synthetically generated peptide
CCEMCCNPACTGA

SEQ ID NO: 2496 - protein, 13 aa, Artificial Sequence
  Synthetically generated peptide
CCEFCCNPACTGA

SEQ ID NO: 2497 - protein, 13 aa, Artificial Sequence
  Synthetically generated peptide
CCEPCCNPACTGA

SEQ ID NO: 2498 - protein, 13 aa, Artificial Sequence
  Synthetically generated peptide
CCESCCNPACTGA

SEQ ID NO: 2499 - protein, 13 aa, Artificial Sequence
  Synthetically generated peptide
CCETCCNPACTGA

SEQ ID NO: 2500 - protein, 13 aa, Artificial Sequence
  Synthetically generated peptide
CCEWCCNPACTGA

SEQ ID NO: 2501 - protein, 13 aa, Artificial Sequence
  Synthetically generated peptide
CCEYCCNPACTGA

SEQ ID NO: 2502 - protein, 13 aa, Artificial Sequence
  Synthetically generated peptide
CCEVCCNPACTGA

SEQ ID NO: 2503 - protein, 14 aa, Artificial Sequence
  Synthetically generated peptide
CCELCCNPACTGAY

SEQ ID NO: 2504 - protein, 14 aa, Artificial Sequence
  Synthetically generated peptide
CCEACCNPACTGAY

SEQ ID NO: 2505 - protein, 14 aa, Artificial Sequence
  Synthetically generated peptide
CCERCCNPACTGAY

SEQ ID NO: 2506 - protein, 14 aa, Artificial Sequence
  Synthetically generated peptide
CCENCCNPACTGAY

SEQ ID NO: 2507 - protein, 14 aa, Artificial Sequence
  Synthetically generated peptide
CCEDCCNPACTGAY

SEQ ID NO: 2508 - protein, 14 aa, Artificial Sequence
  Synthetically generated peptide
CCECCCNPACTGAY

SEQ ID NO: 2509 - protein, 14 aa, Artificial Sequence
  Synthetically generated peptide
CCEQCCNPACTGAY

SEQ ID NO: 2510 - protein, 14 aa, Artificial Sequence
  Synthetically generated peptide
CCEECCNPACTGAY

SEQ ID NO: 2511 - protein, 14 aa, Artificial Sequence
  Synthetically generated peptide
CCEGCCNPACTGAY

SEQ ID NO: 2512 - protein, 14 aa, Artificial Sequence
  Synthetically generated peptide
CCEHCCNPACTGAY

SEQ ID NO: 2513 - protein, 14 aa, Artificial Sequence
  Synthetically generated peptide
CCEICCNPACTGAY

SEQ ID NO: 2514 - protein, 14 aa, Artificial Sequence
  Synthetically generated peptide
CCEKCCNPACTGAY

SEQ ID NO: 2515 - protein, 14 aa, Artificial Sequence
  Synthetically generated peptide
CCEMCCNPACTGAY

SEQ ID NO: 2516 - protein, 14 aa, Artificial Sequence
  Synthetically generated peptide
CCEFCCNPACTGAY

SEQ ID NO: 2517 - protein, 14 aa, Artificial Sequence
  Synthetically generated peptide
CCEPCCNPACTGAY

SEQ ID NO: 2518 - protein, 14 aa, Artificial Sequence
  Synthetically generated peptide
CCESCCNPACTGAY

SEQ ID NO: 2519 - protein, 14 aa, Artificial Sequence
  Synthetically generated peptide
CCETCCNPACTGAY

SEQ ID NO: 2520 - protein, 14 aa, Artificial Sequence
  Synthetically generated peptide
CCEWCCNPACTGAY

SEQ ID NO: 2521 - protein, 14 aa, Artificial Sequence
  Synthetically generated peptide
CCEYCCNPACTGAY

SEQ ID NO: 2522 - protein, 14 aa, Artificial Sequence
  Synthetically generated peptide
CCEVCCNPACTGAY

SEQ ID NO: 2523 - protein, 13 aa, Artificial Sequence
  Synthetically generated peptide
CCELGCNPACTGG

SEQ ID NO: 2524 - protein, 13 aa, Artificial Sequence
  Synthetically generated peptide
CCEAGCNPACTGG

SEQ ID NO: 2525 - protein, 13 aa, Artificial Sequence
  Synthetically generated peptide
CCERGCNPACTGG

SEQ ID NO: 2526 - protein, 13 aa, Artificial Sequence
  Synthetically generated peptide
CCENGCNPACTGG

SEQ ID NO: 2527 - protein, 13 aa, Artificial Sequence
  Synthetically generated peptide
CCEDGCNPACTGG

SEQ ID NO: 2528 - protein, 13 aa, Artificial Sequence
  Synthetically generated peptide
CCECGCNPACTGG

SEQ ID NO: 2529 - protein, 13 aa, Artificial Sequence
  Synthetically generated peptide
CCEQGCNPACTGG

SEQ ID NO: 2530 - protein, 13 aa, Artificial Sequence
  Synthetically generated peptide
CCEEGCNPACTGG

SEQ ID NO: 2531 - protein, 13 aa, Artificial Sequence
  Synthetically generated peptide
CCEGGCNPACTGG

SEQ ID NO: 2532 - protein, 13 aa, Artificial Sequence
  Synthetically generated peptide
CCEHGCNPACTGG

SEQ ID NO: 2533 - protein, 13 aa, Artificial Sequence
  Synthetically generated peptide
CCEIGCNPACTGG

SEQ ID NO: 2534 - protein, 13 aa, Artificial Sequence
  Synthetically generated peptide
CCEKGCNPACTGG

SEQ ID NO: 2535 - protein, 13 aa, Artificial Sequence
  Synthetically generated peptide
CCEMGCNPACTGG

SEQ ID NO: 2536 - protein, 13 aa, Artificial Sequence
  Synthetically generated peptide
CCEFGCNPACTGG

SEQ ID NO: 2537 - protein, 13 aa, Artificial Sequence
  Synthetically generated peptide
CCEPGCNPACTGG

SEQ ID NO: 2538 - protein, 13 aa, Artificial Sequence
  Synthetically generated peptide
CCESGCNPACTGG

SEQ ID NO: 2539 - protein, 13 aa, Artificial Sequence
  Synthetically generated peptide
CCETGCNPACTGG

SEQ ID NO: 2540 - protein, 13 aa, Artificial Sequence
  Synthetically generated peptide
CCEWGCNPACTGG

SEQ ID NO: 2541 - protein, 13 aa, Artificial Sequence
  Synthetically generated peptide
CCEYGCNPACTGG

SEQ ID NO: 2542 - protein, 13 aa, Artificial Sequence
  Synthetically generated peptide
CCEVGCNPACTGG

SEQ ID NO: 2543 - protein, 14 aa, Artificial Sequence
  Synthetically generated peptide
CCELGCNPACTGGY

SEQ ID NO: 2544 - protein, 14 aa, Artificial Sequence
  Synthetically generated peptide
CCEAGCNPACTGGY

SEQ ID NO: 2545 - protein, 14 aa, Artificial Sequence
  Synthetically generated peptide
CCERGCNPACTGGY

SEQ ID NO: 2546 - protein, 14 aa, Artificial Sequence
  Synthetically generated peptide
CCENGCNPACTGGY

SEQ ID NO: 2547 - protein, 14 aa, Artificial Sequence
  Synthetically generated peptide
CCEDGCNPACTGGY

SEQ ID NO: 2548 - protein, 14 aa, Artificial Sequence
  Synthetically generated peptide
CCECGCNPACTGGY

SEQ ID NO: 2549 - protein, 14 aa, Artificial Sequence
  Synthetically generated peptide
CCEQGCNPACTGGY

SEQ ID NO: 2550 - protein, 14 aa, Artificial Sequence
  Synthetically generated peptide
CCEEGCNPACTGGY

SEQ ID NO: 2551 - protein, 14 aa, Artificial Sequence
  Synthetically generated peptide
CCEGGCNPACTGGY

SEQ ID NO: 2552 - protein, 14 aa, Artificial Sequence
  Synthetically generated peptide
CCEHGCNPACTGGY

SEQ ID NO: 2553 - protein, 14 aa, Artificial Sequence
  Synthetically generated peptide
CCEIGCNPACTGGY

SEQ ID NO: 2554 - protein, 14 aa, Artificial Sequence
  Synthetically generated peptide
CCEKGCNPACTGGY

SEQ ID NO: 2555 - protein, 14 aa, Artificial Sequence
  Synthetically generated peptide
CCEMGCNPACTGGY

SEQ ID NO: 2556 - protein, 14 aa, Artificial Sequence
  Synthetically generated peptide
CCEFGCNPACTGGY

SEQ ID NO: 2557 - protein, 14 aa, Artificial Sequence
  Synthetically generated peptide
CCEPGCNPACTGGY

SEQ ID NO: 2558 - protein, 14 aa, Artificial Sequence
  Synthetically generated peptide
CCESGCNPACTGGY

SEQ ID NO: 2559 - protein, 14 aa, Artificial Sequence
  Synthetically generated peptide
CCETGCNPACTGGY

SEQ ID NO: 2560 - protein, 14 aa, Artificial Sequence
  Synthetically generated peptide
CCEWGCNPACTGGY

SEQ ID NO: 2561 - protein, 14 aa, Artificial Sequence
  Synthetically generated peptide
CCEYGCNPACTGGY

SEQ ID NO: 2562 - protein, 14 aa, Artificial Sequence
  Synthetically generated peptide
CCEVGCNPACTGGY

SEQ ID NO: 2563 - protein, 14 aa, Artificial Sequence
  Synthetically generated peptide
CCEVACNPACTGCY

SEQ ID NO: 2564 - protein, 13 aa, Artificial Sequence
  Synthetically generated peptide
CCELGCNPACTGC

SEQ ID NO: 2565 - protein, 13 aa, Artificial Sequence
  Synthetically generated peptide
CCEAGCNPACTGC

SEQ ID NO: 2566 - protein, 13 aa, Artificial Sequence
  Synthetically generated peptide
CCERGCNPACTGC

SEQ ID NO: 2567 - protein, 13 aa, Artificial Sequence
  Synthetically generated peptide
CCENGCNPACTGC

SEQ ID NO: 2568 - protein, 13 aa, Artificial Sequence
  Synthetically generated peptide
CCEDGCNPACTGC

SEQ ID NO: 2569 - protein, 13 aa, Artificial Sequence
  Synthetically generated peptide
CCECGCNPACTGC

SEQ ID NO: 2570 - protein, 13 aa, Artificial Sequence
  Synthetically generated peptide
CCEQGCNPACTGC

SEQ ID NO: 2571 - protein, 13 aa, Artificial Sequence
  Synthetically generated peptide
CCEEGCNPACTGC

SEQ ID NO: 2572 - protein, 13 aa, Artificial Sequence
  Synthetically generated peptide
CCEGGCNPACTGC

SEQ ID NO: 2573 - protein, 13 aa, Artificial Sequence
  Synthetically generated peptide
CCEHGCNPACTGC

SEQ ID NO: 2574 - protein, 13 aa, Artificial Sequence
  Synthetically generated peptide
CCEIGCNPACTGC

SEQ ID NO: 2575 - protein, 13 aa, Artificial Sequence
  Synthetically generated peptide
CCEKGCNPACTGC

SEQ ID NO: 2576 - protein, 13 aa, Artificial Sequence
  Synthetically generated peptide
CCEMGCNPACTGC

SEQ ID NO: 2577 - protein, 13 aa, Artificial Sequence
  Synthetically generated peptide
CCEFGCNPACTGC

SEQ ID NO: 2578 - protein, 13 aa, Artificial Sequence
  Synthetically generated peptide
CCEPGCNPACTGC

SEQ ID NO: 2579 - protein, 13 aa, Artificial Sequence
  Synthetically generated peptide
CCESGCNPACTGC

SEQ ID NO: 2580 - protein, 13 aa, Artificial Sequence
  Synthetically generated peptide
CCETGCNPACTGC

SEQ ID NO: 2581 - protein, 13 aa, Artificial Sequence
  Synthetically generated peptide
CCEWGCNPACTGC

SEQ ID NO: 2582 - protein, 13 aa, Artificial Sequence
  Synthetically generated peptide
CCEYGCNPACTGC

SEQ ID NO: 2583 - protein, 13 aa, Artificial Sequence
  Synthetically generated peptide
CCEVGCNPACTGC

SEQ ID NO: 2584 - protein, 14 aa, Artificial Sequence
  Synthetically generated peptide
CCELGCNPACTGCY

SEQ ID NO: 2585 - protein, 14 aa, Artificial Sequence
  Synthetically generated peptide
CCEAGCNPACTGCY

SEQ ID NO: 2586 - protein, 14 aa, Artificial Sequence
  Synthetically generated peptide
CCERGCNPACTGCY

SEQ ID NO: 2587 - protein, 14 aa, Artificial Sequence
  Synthetically generated peptide
CCENGCNPACTGCY

SEQ ID NO: 2588 - protein, 14 aa, Artificial Sequence
  Synthetically generated peptide
CCEDGCNPACTGCY

SEQ ID NO: 2589 - protein, 14 aa, Artificial Sequence
  Synthetically generated peptide
CCECGCNPACTGCY

SEQ ID NO: 2590 - protein, 14 aa, Artificial Sequence
  Synthetically generated peptide
CCEQGCNPACTGCY

SEQ ID NO: 2591 - protein, 14 aa, Artificial Sequence
  Synthetically generated peptide
CCEEGCNPACTGCY

SEQ ID NO: 2592 - protein, 14 aa, Artificial Sequence
  Synthetically generated peptide
CCEGGCNPACTGCY

SEQ ID NO: 2593 - protein, 14 aa, Artificial Sequence
  Synthetically generated peptide
CCEHGCNPACTGCY

SEQ ID NO: 2594 - protein, 14 aa, Artificial Sequence
  Synthetically generated peptide
CCEIGCNPACTGCY

SEQ ID NO: 2595 - protein, 14 aa, Artificial Sequence
  Synthetically generated peptide
CCEKGCNPACTGCY

SEQ ID NO: 2596 - protein, 14 aa, Artificial Sequence
  Synthetically generated peptide
CCEMGCNPACTGCY

SEQ ID NO: 2597 - protein, 14 aa, Artificial Sequence
  Synthetically generated peptide
CCEFGCNPACTGCY

SEQ ID NO: 2598 - protein, 14 aa, Artificial Sequence
  Synthetically generated peptide
CCEPGCNPACTGCY

SEQ ID NO: 2599 - protein, 14 aa, Artificial Sequence
  Synthetically generated peptide
CCESGCNPACTGCY

SEQ ID NO: 2600 - protein, 14 aa, Artificial Sequence
  Synthetically generated peptide
CCETGCNPACTGCY

SEQ ID NO: 2601 - protein, 14 aa, Artificial Sequence
  Synthetically generated peptide
CCEWGCNPACTGCY

SEQ ID NO: 2602 - protein, 14 aa, Artificial Sequence
  Synthetically generated peptide
CCEYGCNPACTGCY

SEQ ID NO: 2603 - protein, 14 aa, Artificial Sequence
  Synthetically generated peptide
CCEVGCNPACTGCY

SEQ ID NO: 2604 - protein, 13 aa, Artificial Sequence
  Synthetically generated peptide
CCELCCNPACTGG

SEQ ID NO: 2605 - protein, 13 aa, Artificial Sequence
  Synthetically generated peptide
CCEACCNPACTGG

SEQ ID NO: 2606 - protein, 13 aa, Artificial Sequence
  Synthetically generated peptide
CCERCCNPACTGG

SEQ ID NO: 2607 - protein, 13 aa, Artificial Sequence
  Synthetically generated peptide
CCENCCNPACTGG

SEQ ID NO: 2608 - protein, 13 aa, Artificial Sequence
  Synthetically generated peptide
CCEDCCNPACTGG

SEQ ID NO: 2609 - protein, 13 aa, Artificial Sequence
  Synthetically generated peptide
CCECCCNPACTGG

SEQ ID NO: 2610 - protein, 13 aa, Artificial Sequence
  Synthetically generated peptide
CCEQCCNPACTGG

SEQ ID NO: 2611 - protein, 13 aa, Artificial Sequence
  Synthetically generated peptide
CCEECCNPACTGG

SEQ ID NO: 2612 - protein, 13 aa, Artificial Sequence
  Synthetically generated peptide
CCEGCCNPACTGG

SEQ ID NO: 2613 - protein, 13 aa, Artificial Sequence
  Synthetically generated peptide
CCEHCCNPACTGG

SEQ ID NO: 2614 - protein, 13 aa, Artificial Sequence
  Synthetically generated peptide
CCEICCNPACTGG

SEQ ID NO: 2615 - protein, 13 aa, Artificial Sequence
  Synthetically generated peptide
CCEKCCNPACTGG

SEQ ID NO: 2616 - protein, 13 aa, Artificial Sequence
  Synthetically generated peptide
CCEMCCNPACTGG

SEQ ID NO: 2617 - protein, 13 aa, Artificial Sequence
  Synthetically generated peptide
CCEFCCNPACTGG

SEQ ID NO: 2618 - protein, 13 aa, Artificial Sequence
  Synthetically generated peptide
CCEPCCNPACTGG

SEQ ID NO: 2619 - protein, 13 aa, Artificial Sequence
  Synthetically generated peptide
CCESCCNPACTGG

SEQ ID NO: 2620 - protein, 13 aa, Artificial Sequence
  Synthetically generated peptide
CCETCCNPACTGG

SEQ ID NO: 2621 - protein, 13 aa, Artificial Sequence
  Synthetically generated peptide
CCEWCCNPACTGG

SEQ ID NO: 2622 - protein, 13 aa, Artificial Sequence
  Synthetically generated peptide
CCEYCCNPACTGG

SEQ ID NO: 2623 - protein, 13 aa, Artificial Sequence
  Synthetically generated peptide
CCEVCCNPACTGG

SEQ ID NO: 2624 - protein, 14 aa, Artificial Sequence
  Synthetically generated peptide
CCELCCNPACTGGY

SEQ ID NO: 2625 - protein, 14 aa, Artificial Sequence
  Synthetically generated peptide
CCEACCNPACTGGY

SEQ ID NO: 2626 - protein, 14 aa, Artificial Sequence
  Synthetically generated peptide
CCERCCNPACTGGY

SEQ ID NO: 2627 - protein, 14 aa, Artificial Sequence
  Synthetically generated peptide
CCENCCNPACTGGY

SEQ ID NO: 2628 - protein, 14 aa, Artificial Sequence
  Synthetically generated peptide
CCEDCCNPACTGGY

SEQ ID NO: 2629 - protein, 14 aa, Artificial Sequence
  Synthetically generated peptide
CCECCCNPACTGGY

SEQ ID NO: 2630 - protein, 14 aa, Artificial Sequence
  Synthetically generated peptide
CCEQCCNPACTGGY

SEQ ID NO: 2631 - protein, 14 aa, Artificial Sequence
  Synthetically generated peptide
CCEECCNPACTGGY

SEQ ID NO: 2632 - protein, 14 aa, Artificial Sequence
  Synthetically generated peptide
CCEGCCNPACTGGY

SEQ ID NO: 2633 - protein, 14 aa, Artificial Sequence
  Synthetically generated peptide
CCEHCCNPACTGGY

SEQ ID NO: 2634 - protein, 14 aa, Artificial Sequence
  Synthetically generated peptide
CCEICCNPACTGGY

SEQ ID NO: 2635 - protein, 14 aa, Artificial Sequence
  Synthetically generated peptide
CCEKCCNPACTGGY

SEQ ID NO: 2636 - protein, 14 aa, Artificial Sequence
  Synthetically generated peptide
CCEMCCNPACTGGY

SEQ ID NO: 2637 - protein, 14 aa, Artificial Sequence
  Synthetically generated peptide
CCEFCCNPACTGGY

SEQ ID NO: 2638 - protein, 14 aa, Artificial Sequence
  Synthetically generated peptide
CCEPCCNPACTGGY

SEQ ID NO: 2639 - protein, 14 aa, Artificial Sequence
  Synthetically generated peptide
CCESCCNPACTGGY

SEQ ID NO: 2640 - protein, 14 aa, Artificial Sequence
  Synthetically generated peptide
CCETCCNPACTGGY

SEQ ID NO: 2641 - protein, 14 aa, Artificial Sequence
  Synthetically generated peptide
CCEWCCNPACTGGY

SEQ ID NO: 2642 - protein, 14 aa, Artificial Sequence
  Synthetically generated peptide
CCEYCCNPACTGGY

SEQ ID NO: 2643 - protein, 14 aa, Artificial Sequence
  Synthetically generated peptide
CCEVCCNPACTGGY

SEQ ID NO: 2644 - protein, 13 aa, Artificial Sequence
  Synthetically generated peptide
CCELACNPACTGG

SEQ ID NO: 2645 - protein, 13 aa, Artificial Sequence
  Synthetically generated peptide
CCEAACNPACTGG

SEQ ID NO: 2646 - protein, 13 aa, Artificial Sequence
  Synthetically generated peptide
CCERACNPACTGG

SEQ ID NO: 2647 - protein, 13 aa, Artificial Sequence
  Synthetically generated peptide
CCENACNPACTGG

SEQ ID NO: 2648 - protein, 13 aa, Artificial Sequence
  Synthetically generated peptide
CCEDACNPACTGG

SEQ ID NO: 2649 - protein, 13 aa, Artificial Sequence
  Synthetically generated peptide
CCECACNPACTGG

SEQ ID NO: 2650 - protein, 13 aa, Artificial Sequence
  Synthetically generated peptide
CCEQACNPACTGG

SEQ ID NO: 2651 - protein, 13 aa, Artificial Sequence
  Synthetically generated peptide
CCEEACNPACTGG

SEQ ID NO: 2652 - protein, 13 aa, Artificial Sequence
  Synthetically generated peptide
CCEGACNPACTGG

SEQ ID NO: 2653 - protein, 13 aa, Artificial Sequence
  Synthetically generated peptide
CCEHACNPACTGG

SEQ ID NO: 2654 - protein, 13 aa, Artificial Sequence
  Synthetically generated peptide
CCEIACNPACTGG

SEQ ID NO: 2655 - protein, 13 aa, Artificial Sequence
  Synthetically generated peptide
CCEKACNPACTGG

SEQ ID NO: 2656 - protein, 13 aa, Artificial Sequence
  Synthetically generated peptide
CCEMACNPACTGG

SEQ ID NO: 2657 - protein, 13 aa, Artificial Sequence
  Synthetically generated peptide
CCEFACNPACTGG

SEQ ID NO: 2658 - protein, 13 aa, Artificial Sequence
  Synthetically generated peptide
CCEPACNPACTGG

SEQ ID NO: 2659 - protein, 13 aa, Artificial Sequence
  Synthetically generated peptide
CCESACNPACTGG

SEQ ID NO: 2660 - protein, 13 aa, Artificial Sequence
  Synthetically generated peptide
CCETACNPACTGG

SEQ ID NO: 2661 - protein, 13 aa, Artificial Sequence
  Synthetically generated peptide
CCEWACNPACTGG

SEQ ID NO: 2662 - protein, 13 aa, Artificial Sequence
  Synthetically generated peptide
CCEYACNPACTGG

SEQ ID NO: 2663 - protein, 13 aa, Artificial Sequence
  Synthetically generated peptide
CCEVACNPACTGG

SEQ ID NO: 2664 - protein, 14 aa, Artificial Sequence
  Synthetically generated peptide
CCELACNPACTGGY

SEQ ID NO: 2665 - protein, 14 aa, Artificial Sequence
  Synthetically generated peptide
CCEAACNPACTGGY

SEQ ID NO: 2666 - protein, 14 aa, Artificial Sequence
  Synthetically generated peptide
CCERACNPACTGGY

SEQ ID NO: 2667 - protein, 14 aa, Artificial Sequence
  Synthetically generated peptide
CCENACNPACTGGY

SEQ ID NO: 2668 - protein, 14 aa, Artificial Sequence
  Synthetically generated peptide
CCEDACNPACTGGY

SEQ ID NO: 2669 - protein, 14 aa, Artificial Sequence
  Synthetically generated peptide
CCECACNPACTGGY

SEQ ID NO: 2670 - protein, 14 aa, Artificial Sequence
  Synthetically generated peptide
CCEQACNPACTGGY

SEQ ID NO: 2671 - protein, 14 aa, Artificial Sequence
  Synthetically generated peptide
CCEEACNPACTGGY

SEQ ID NO: 2672 - protein, 14 aa, Artificial Sequence
  Synthetically generated peptide
CCEGACNPACTGGY

SEQ ID NO: 2673 - protein, 14 aa, Artificial Sequence
  Synthetically generated peptide
CCEHACNPACTGGY

SEQ ID NO: 2674 - protein, 14 aa, Artificial Sequence
  Synthetically generated peptide
CCEIACNPACTGGY

SEQ ID NO: 2675 - protein, 14 aa, Artificial Sequence
  Synthetically generated peptide
CCEKACNPACTGGY

SEQ ID NO: 2676 - protein, 14 aa, Artificial Sequence
  Synthetically generated peptide
CCEMACNPACTGGY

SEQ ID NO: 2677 - protein, 14 aa, Artificial Sequence
  Synthetically generated peptide
CCEFACNPACTGGY

SEQ ID NO: 2678 - protein, 14 aa, Artificial Sequence
  Synthetically generated peptide
CCEPACNPACTGGY

SEQ ID NO: 2679 - protein, 14 aa, Artificial Sequence
  Synthetically generated peptide
CCESACNPACTGGY

SEQ ID NO: 2680 - protein, 14 aa, Artificial Sequence
  Synthetically generated peptide
CCETACNPACTGGY

SEQ ID NO: 2681 - protein, 14 aa, Artificial Sequence
  Synthetically generated peptide
CCEWACNPACTGGY

SEQ ID NO: 2682 - protein, 14 aa, Artificial Sequence
  Synthetically generated peptide
CCEYACNPACTGGY

SEQ ID NO: 2683 - protein, 14 aa, Artificial Sequence
  Synthetically generated peptide
CCEVACNPACTGGY

SEQ ID NO: 2684 - protein, 13 aa, Artificial Sequence
  Synthetically generated peptide
CCELGCNPACTGA

SEQ ID NO: 2685 - protein, 13 aa, Artificial Sequence
  Synthetically generated peptide
CCEAGCNPACTGA

SEQ ID NO: 2686 - protein, 13 aa, Artificial Sequence
  Synthetically generated peptide
CCERGCNPACTGA

SEQ ID NO: 2687 - protein, 13 aa, Artificial Sequence
  Synthetically generated peptide
CCENGCNPACTGA

SEQ ID NO: 2688 - protein, 13 aa, Artificial Sequence
  Synthetically generated peptide
CCEDGCNPACTGA

SEQ ID NO: 2689 - protein, 13 aa, Artificial Sequence
  Synthetically generated peptide
CCECGCNPACTGA

SEQ ID NO: 2690 - protein, 13 aa, Artificial Sequence
  Synthetically generated peptide
CCEQGCNPACTGA

SEQ ID NO: 2691 - protein, 13 aa, Artificial Sequence
  Synthetically generated peptide
CCEEGCNPACTGA

SEQ ID NO: 2692 - protein, 13 aa, Artificial Sequence
  Synthetically generated peptide
CCEGGCNPACTGA

SEQ ID NO: 2693 - protein, 13 aa, Artificial Sequence
  Synthetically generated peptide
CCEHGCNPACTGA

SEQ ID NO: 2694 - protein, 13 aa, Artificial Sequence
  Synthetically generated peptide
CCEIGCNPACTGA

SEQ ID NO: 2695 - protein, 13 aa, Artificial Sequence
  Synthetically generated peptide
CCEKGCNPACTGA

SEQ ID NO: 2696 - protein, 13 aa, Artificial Sequence
  Synthetically generated peptide
CCEMGCNPACTGA

SEQ ID NO: 2697 - protein, 13 aa, Artificial Sequence
  Synthetically generated peptide
CCEFGCNPACTGA

SEQ ID NO: 2698 - protein, 13 aa, Artificial Sequence
  Synthetically generated peptide
CCEPGCNPACTGA

SEQ ID NO: 2699 - protein, 13 aa, Artificial Sequence
  Synthetically generated peptide
CCESGCNPACTGA

SEQ ID NO: 2700 - protein, 13 aa, Artificial Sequence
  Synthetically generated peptide
CCETGCNPACTGA

SEQ ID NO: 2701 - protein, 13 aa, Artificial Sequence
  Synthetically generated peptide
CCEWGCNPACTGA

SEQ ID NO: 2702 - protein, 13 aa, Artificial Sequence
  Synthetically generated peptide
CCEYGCNPACTGA

SEQ ID NO: 2703 - protein, 13 aa, Artificial Sequence
  Synthetically generated peptide
CCEVGCNPACTGA

SEQ ID NO: 2704 - protein, 14 aa, Artificial Sequence
  Synthetically generated peptide
CCELACNPACTGAY

SEQ ID NO: 2705 - protein, 14 aa, Artificial Sequence
  Synthetically generated peptide
CCEAACNPACTGAY

SEQ ID NO: 2706 - protein, 14 aa, Artificial Sequence
  Synthetically generated peptide
CCERACNPACTGAY

SEQ ID NO: 2707 - protein, 14 aa, Artificial Sequence
  Synthetically generated peptide
CCENACNPACTGAY

SEQ ID NO: 2708 - protein, 14 aa, Artificial Sequence
  Synthetically generated peptide
CCEDACNPACTGAY

SEQ ID NO: 2709 - protein, 14 aa, Artificial Sequence
  Synthetically generated peptide
CCECACNPACTGAY

SEQ ID NO: 2710 - protein, 14 aa, Artificial Sequence
  Synthetically generated peptide
CCEQACNPACTGAY

SEQ ID NO: 2711 - protein, 14 aa, Artificial Sequence
  Synthetically generated peptide
CCEEACNPACTGAY

SEQ ID NO: 2712 - protein, 14 aa, Artificial Sequence
  Synthetically generated peptide
CCEGACNPACTGAY

SEQ ID NO: 2713 - protein, 14 aa, Artificial Sequence
  Synthetically generated peptide
CCEHACNPACTGAY

SEQ ID NO: 2714 - protein, 14 aa, Artificial Sequence
  Synthetically generated peptide
CCEIACNPACTGAY

SEQ ID NO: 2715 - protein, 14 aa, Artificial Sequence
  Synthetically generated peptide
CCEKACNPACTGAY

SEQ ID NO: 2716 - protein, 14 aa, Artificial Sequence
  Synthetically generated peptide
CCEMACNPACTGAY

SEQ ID NO: 2717 - protein, 14 aa, Artificial Sequence
  Synthetically generated peptide
CCEFACNPACTGAY

SEQ ID NO: 2718 - protein, 14 aa, Artificial Sequence
  Synthetically generated peptide
CCEPACNPACTGAY

SEQ ID NO: 2719 - protein, 14 aa, Artificial Sequence
  Synthetically generated peptide
CCESACNPACTGAY

SEQ ID NO: 2720 - protein, 14 aa, Artificial Sequence
  Synthetically generated peptide
CCETACNPACTGAY

SEQ ID NO: 2721 - protein, 14 aa, Artificial Sequence
  Synthetically generated peptide
CCEWACNPACTGAY

SEQ ID NO: 2722 - protein, 14 aa, Artificial Sequence
  Synthetically generated peptide
CCEYACNPACTGAY

SEQ ID NO: 2723 - protein, 14 aa, Artificial Sequence
  Synthetically generated peptide
CCEVACNPACTGAY

SEQ ID NO: 2724 - protein, 12 aa, Artificial Sequence
  Synthetically generated peptide
CCLCCNPACTGC

SEQ ID NO: 2725 - protein, 11 aa, Artificial Sequence
  Synthetically generated peptide
CCCCNPACTGC

SEQ ID NO: 2726 - protein, 11 aa, Artificial Sequence
  Synthetically generated peptide
CCLCCPACTGC

SEQ ID NO: 2727 - protein, 11 aa, Artificial Sequence
  Synthetically generated peptide
CCLCCNACTGC

SEQ ID NO: 2728 - protein, 11 aa, Artificial Sequence
  Synthetically generated peptide
CCLCCNPCTGC

SEQ ID NO: 2729 - protein, 11 aa, Artificial Sequence
  Synthetically generated peptide
CCLCCNPACGC

SEQ ID NO: 2730 - protein, 11 aa, Artificial Sequence
  Synthetically generated peptide
CCLCCNPACTC

SEQ ID NO: 2731 - protein, 12 aa, Artificial Sequence
  Synthetically generated peptide
CCECCNPACTGC

SEQ ID NO: 2732 - protein, 11 aa, Artificial Sequence
  Synthetically generated peptide
CCECCPACTGC

SEQ ID NO: 2733 - protein, 11 aa, Artificial Sequence
  Synthetically generated peptide
CCECCNACTGC

SEQ ID NO: 2734 - protein, 11 aa, Artificial Sequence
  Synthetically generated peptide
CCECCNPCTGC

SEQ ID NO: 2735 - protein, 11 aa, Artificial Sequence
  Synthetically generated peptide
CCECCNPACGC

SEQ ID NO: 2736 - protein, 11 aa, Artificial Sequence
  Synthetically generated peptide
CCECCNPACTC

SEQ ID NO: 2737 - protein, 12 aa, Artificial Sequence
  Synthetically generated peptide
CCELCCPACTGC

SEQ ID NO: 2738 - protein, 11 aa, Artificial Sequence
  Synthetically generated peptide
CCELCCACTGC

SEQ ID NO: 2739 - protein, 11 aa, Artificial Sequence
  Synthetically generated peptide
CCELCCPCTGC

SEQ ID NO: 2740 - protein, 11 aa, Artificial Sequence
  Synthetically generated peptide
CCELCCPACGC

SEQ ID NO: 2741 - protein, 11 aa, Artificial Sequence
  Synthetically generated peptide
CCELCCPACTC

SEQ ID NO: 2742 - protein, 12 aa, Artificial Sequence
  Synthetically generated peptide
CCELCCNACTGC

SEQ ID NO: 2743 - protein, 11 aa, Artificial Sequence
  Synthetically generated peptide
CCELCCNCTGC

SEQ ID NO: 2744 - protein, 11 aa, Artificial Sequence
  Synthetically generated peptide
CCELCCNACGC

SEQ ID NO: 2745 - protein, 11 aa, Artificial Sequence
  Synthetically generated peptide
CCELCCNACTC

SEQ ID NO: 2746 - protein, 12 aa, Artificial Sequence
  Synthetically generated peptide
CCELCCNPCTGC

SEQ ID NO: 2747 - protein, 11 aa, Artificial Sequence
  Synthetically generated peptide
CCELCCNPCGC

SEQ ID NO: 2748 - protein, 11 aa, Artificial Sequence
  Synthetically generated peptide
CCELCCNPCTC

SEQ ID NO: 2749 - protein, 12 aa, Artificial Sequence
  Synthetically generated peptide
CCELCCNPACGC

SEQ ID NO: 2750 - protein, 11 aa, Artificial Sequence
  Synthetically generated peptide
CCELCCNPACC

SEQ ID NO: 2751 - protein, 12 aa, Artificial Sequence
  Synthetically generated peptide
CCELCCNPACTC

SEQ ID NO: 2752 - protein, 12 aa, Artificial Sequence
  Synthetically generated peptide
CCWCCNPACTGC

SEQ ID NO: 2753 - protein, 11 aa, Artificial Sequence
  Synthetically generated peptide
CCCCNPACTGC

SEQ ID NO: 2754 - protein, 11 aa, Artificial Sequence
  Synthetically generated peptide
CCWCCPACTGC

SEQ ID NO: 2755 - protein, 11 aa, Artificial Sequence
  Synthetically generated peptide
CCWCCNACTGC

SEQ ID NO: 2756 - protein, 11 aa, Artificial Sequence
  Synthetically generated peptide
CCWCCNPCTGC

SEQ ID NO: 2757 - protein, 11 aa, Artificial Sequence
  Synthetically generated peptide
CCWCCNPACGC

SEQ ID NO: 2758 - protein, 11 aa, Artificial Sequence
  Synthetically generated peptide
CCWCCNPACTC

SEQ ID NO: 2759 - protein, 12 aa, Artificial Sequence
  Synthetically generated peptide
CCECCNPACTGC

SEQ ID NO: 2760 - protein, 11 aa, Artificial Sequence
  Synthetically generated peptide
CCECCPACTGC

SEQ ID NO: 2761 - protein, 11 aa, Artificial Sequence
  Synthetically generated peptide
CCECCNACTGC

SEQ ID NO: 2762 - protein, 11 aa, Artificial Sequence
  Synthetically generated peptide
CCECCNPCTGC

SEQ ID NO: 2763 - protein, 11 aa, Artificial Sequence
  Synthetically generated peptide
CCECCNPACGC

SEQ ID NO: 2764 - protein, 11 aa, Artificial Sequence
  Synthetically generated peptide
CCECCNPACTC

SEQ ID NO: 2765 - protein, 12 aa, Artificial Sequence
  Synthetically generated peptide
CCEWCCPACTGC

SEQ ID NO: 2766 - protein, 11 aa, Artificial Sequence
  Synthetically generated peptide
CCEWCCACTGC

SEQ ID NO: 2767 - protein, 11 aa, Artificial Sequence
  Synthetically generated peptide
CCEWCCPCTGC

SEQ ID NO: 2768 - protein, 11 aa, Artificial Sequence
  Synthetically generated peptide
CCEWCCPACGC

SEQ ID NO: 2769 - protein, 11 aa, Artificial Sequence
  Synthetically generated peptide
CCEWCCPACTC

SEQ ID NO: 2770 - protein, 12 aa, Artificial Sequence
  Synthetically generated peptide
CCEWCCNACTGC

SEQ ID NO: 2771 - protein, 11 aa, Artificial Sequence
  Synthetically generated peptide
CCEWCCNCTGC

SEQ ID NO: 2772 - protein, 11 aa, Artificial Sequence
  Synthetically generated peptide
CCEWCCNACGC

SEQ ID NO: 2773 - protein, 11 aa, Artificial Sequence
  Synthetically generated peptide
CCEWCCNACTC

SEQ ID NO: 2774 - protein, 12 aa, Artificial Sequence
  Synthetically generated peptide
CCEWCCNPCTGC

SEQ ID NO: 2775 - protein, 11 aa, Artificial Sequence
  Synthetically generated peptide
CCEWCCNPCGC

SEQ ID NO: 2776 - protein, 11 aa, Artificial Sequence
  Synthetically generated peptide
CCEWCCNPCTC

SEQ ID NO: 2777 - protein, 12 aa, Artificial Sequence
  Synthetically generated peptide
CCEWCCNPACGC

SEQ ID NO: 2778 - protein, 11 aa, Artificial Sequence
  Synthetically generated peptide
CCEWCCNPACC

SEQ ID NO: 2779 - protein, 12 aa, Artificial Sequence
  Synthetically generated peptide
CCEWCCNPACTC

SEQ ID NO: 2780 - protein, 12 aa, Artificial Sequence
  Synthetically generated peptide
CCFCCNPACTGC

SEQ ID NO: 2781 - protein, 11 aa, Artificial Sequence
  Synthetically generated peptide
CCCCNPACTGC

SEQ ID NO: 2782 - protein, 11 aa, Artificial Sequence
  Synthetically generated peptide
CCFCCPACTGC

SEQ ID NO: 2783 - protein, 11 aa, Artificial Sequence
  Synthetically generated peptide
CCFCCNACTGC

SEQ ID NO: 2784 - protein, 11 aa, Artificial Sequence
  Synthetically generated peptide
CCFCCNPCTGC

SEQ ID NO: 2785 - protein, 11 aa, Artificial Sequence
  Synthetically generated peptide
CCFCCNPACGC

SEQ ID NO: 2786 - protein, 11 aa, Artificial Sequence
  Synthetically generated peptide
CCFCCNPACTC

SEQ ID NO: 2787 - protein, 12 aa, Artificial Sequence
  Synthetically generated peptide
CCECCNPACTGC

SEQ ID NO: 2788 - protein, 11 aa, Artificial Sequence
  Synthetically generated peptide
CCECCPACTGC

SEQ ID NO: 2789 - protein, 11 aa, Artificial Sequence
  Synthetically generated peptide
CCECCNACTGC

SEQ ID NO: 2790 - protein, 11 aa, Artificial Sequence
  Synthetically generated peptide
CCECCNPCTGC

SEQ ID NO: 2791 - protein, 11 aa, Artificial Sequence
  Synthetically generated peptide
CCECCNPACGC

SEQ ID NO: 2792 - protein, 11 aa, Artificial Sequence
  Synthetically generated peptide
CCECCNPACTC

SEQ ID NO: 2793 - protein, 12 aa, Artificial Sequence
  Synthetically generated peptide
CCEFCCPACTGC

SEQ ID NO: 2794 - protein, 11 aa, Artificial Sequence
  Synthetically generated peptide
CCEFCCACTGC

SEQ ID NO: 2795 - protein, 11 aa, Artificial Sequence
  Synthetically generated peptide
CCEFCCPCTGC

SEQ ID NO: 2796 - protein, 11 aa, Artificial Sequence
  Synthetically generated peptide
CCEFCCPACGC

SEQ ID NO: 2797 - protein, 11 aa, Artificial Sequence
  Synthetically generated peptide
CCEFCCPACTC

SEQ ID NO: 2798 - protein, 12 aa, Artificial Sequence
  Synthetically generated peptide
CCEFCCNACTGC

SEQ ID NO: 2799 - protein, 11 aa, Artificial Sequence
  Synthetically generated peptide
CCEFCCNCTGC

SEQ ID NO: 2800 - protein, 11 aa, Artificial Sequence
  Synthetically generated peptide
CCEFCCNACGC

SEQ ID NO: 2801 - protein, 11 aa, Artificial Sequence
  Synthetically generated peptide
CCEFCCNACTC

SEQ ID NO: 2802 - protein, 12 aa, Artificial Sequence
  Synthetically generated peptide
CCEFCCNPCTGC

SEQ ID NO: 2803 - protein, 11 aa, Artificial Sequence
  Synthetically generated peptide
CCEFCCNPCGC

SEQ ID NO: 2804 - protein, 11 aa, Artificial Sequence
  Synthetically generated peptide
CCEFCCNPCTC

SEQ ID NO: 2805 - protein, 12 aa, Artificial Sequence
  Synthetically generated peptide
CCEFCCNPACGC

SEQ ID NO: 2806 - protein, 11 aa, Artificial Sequence
  Synthetically generated peptide
CCEFCCNPACC

SEQ ID NO: 2807 - protein, 12 aa, Artificial Sequence
  Synthetically generated peptide
CCEFCCNPACTC

SEQ ID NO: 2808 - protein, 14 aa, Artificial Sequence
  Synthetically generated peptide
  VARIANT (1)..(14): Xaa = Any Amino Acid
CCXELCCNPACTGC

SEQ ID NO: 2809 - protein, 15 aa, Artificial Sequence
  Synthetically generated peptide
  VARIANT (1)..(15): Xaa = Any Amino Acid
CCXXELCCNPACTGC

SEQ ID NO: 2810 - protein, 16 aa, Artificial Sequence
  Synthetically generated peptide
  VARIANT (1)..(16): Xaa = Any Amino Acid
CCXXXELCCNPACTGC

SEQ ID NO: 2811 - protein, 17 aa, Artificial Sequence
  Synthetically generated peptide
  VARIANT (1)..(17): Xaa = Any Amino Acid
CCXXXXELCCNPACTGC

SEQ ID NO: 2812 - protein, 17 aa, Artificial Sequence
  Synthetically generated peptide
  VARIANT (1)..(17): Xaa = Any Amino Acid
CCXXXEXLCCNPACTGC

SEQ ID NO: 2813 - protein, 17 aa, Artificial Sequence
  Synthetically generated peptide
  VARIANT (1)..(17): Xaa = Any Amino Acid
CCXXXELXCCNPACTGC

SEQ ID NO: 2814 - protein, 17 aa, Artificial Sequence
  Synthetically generated peptide
  VARIANT (1)..(17): Xaa = Any Amino Acid
CCXXXELCCXNPACTGC

SEQ ID NO: 2815 - protein, 17 aa, Artificial Sequence
  Synthetically generated peptide
  VARIANT (1)..(17): Xaa = Any Amino Acid
CCXXXELCCNXPACTGC

SEQ ID NO: 2816 - protein, 17 aa, Artificial Sequence
  Synthetically generated peptide
  VARIANT (1)..(17): Xaa = Any Amino Acid
CCXXXELCCNPXACTGC

SEQ ID NO: 2817 - protein, 17 aa, Artificial Sequence
  Synthetically generated peptide
  VARIANT (1)..(17): Xaa = Any Amino Acid
CCXXXELCCNPAXCTGC

SEQ ID NO: 2818 - protein, 17 aa, Artificial Sequence
  Synthetically generated peptide
  VARIANT (1)..(17): Xaa = Any Amino Acid
CCXXXELCCNPACXTGC

SEQ ID NO: 2819 - protein, 17 aa, Artificial Sequence
  Synthetically generated peptide
  VARIANT (1)..(17): Xaa = Any Amino Acid
CCXXXELCCNPACTXGC

SEQ ID NO: 2820 - protein, 17 aa, Artificial Sequence
  Synthetically generated peptide
  VARIANT (1)..(17): Xaa = Any Amino Acid
CCXXXELCCNPACTGXC

SEQ ID NO: 2821 - protein, 16 aa, Artificial Sequence
  Synthetically generated peptide
  VARIANT (1)..(16): Xaa = Any Amino Acid
CCXXEXLCCNPACTGC

SEQ ID NO: 2822 - protein, 17 aa, Artificial Sequence
  Synthetically generated peptide
  VARIANT (1)..(17): Xaa = Any Amino Acid
CCXXEXXLCCNPACTGC

SEQ ID NO: 2823 - protein, 17 aa, Artificial Sequence
  Synthetically generated peptide
  VARIANT (1)..(17): Xaa = Any Amino Acid
CCXXEXLXCCNPACTGC

SEQ ID NO: 2824 - protein, 17 aa, Artificial Sequence
  Synthetically generated peptide
  VARIANT (1)..(17): Xaa = Any Amino Acid
CCXXEXLCCXNPACTGC

SEQ ID NO: 2825 - protein, 17 aa, Artificial Sequence
  Synthetically generated peptide
  VARIANT (1)..(17): Xaa = Any Amino Acid
CCXXEXLCCNXPACTGC

SEQ ID NO: 2826 - protein, 17 aa, Artificial Sequence
  Synthetically generated peptide
  VARIANT (1)..(17): Xaa = Any Amino Acid
CCXXEXLCCNPXACTGC

SEQ ID NO: 2827 - protein, 17 aa, Artificial Sequence
  Synthetically generated peptide
  VARIANT (1)..(17): Xaa = Any Amino Acid
CCXXEXLCCNPAXCTGC

SEQ ID NO: 2828 - protein, 17 aa, Artificial Sequence
  Synthetically generated peptide
  VARIANT (1)..(17): Xaa = Any Amino Acid
CCXXEXLCCNPACXTGC

SEQ ID NO: 2829 - protein, 17 aa, Artificial Sequence
  Synthetically generated peptide
  VARIANT (1)..(17): Xaa = Any Amino Acid
CCXXEXLCCNPACTXGC

SEQ ID NO: 2830 - protein, 17 aa, Artificial Sequence
  Synthetically generated peptide
  VARIANT (1)..(17): Xaa = Any Amino Acid
CCXXEXLCCNPACTGXC

SEQ ID NO: 2831 - protein, 16 aa, Artificial Sequence
  Synthetically generated peptide
  VARIANT (1)..(16): Xaa = Any Amino Acid
CCXXELXCCNPACTGC

SEQ ID NO: 2832 - protein, 17 aa, Artificial Sequence
  Synthetically generated peptide
  VARIANT (1)..(17): Xaa = Any Amino Acid
CCXXELXXCCNPACTGC

SEQ ID NO: 2833 - protein, 17 aa, Artificial Sequence
  Synthetically generated peptide
  VARIANT (1)..(17): Xaa = Any Amino Acid
CCXXELXCCXNPACTGC

SEQ ID NO: 2834 - protein, 17 aa, Artificial Sequence
  Synthetically generated peptide
  VARIANT (1)..(17): Xaa = Any Amino Acid
CCXXELXCCNXPACTGC

SEQ ID NO: 2835 - protein, 17 aa, Artificial Sequence
  Synthetically generated peptide
  VARIANT (1)..(17): Xaa = Any Amino Acid
CCXXELXCCNPXACTGC

SEQ ID NO: 2836 - protein, 17 aa, Artificial Sequence
  Synthetically generated peptide
  VARIANT (1)..(17): Xaa = Any Amino Acid
CCXXELXCCNPAXCTGC

SEQ ID NO: 2837 - protein, 17 aa, Artificial Sequence
  Synthetically generated peptide
  VARIANT (1)..(17): Xaa = Any Amino Acid
CCXXELXCCNPACXTGC

SEQ ID NO: 2838 - protein, 17 aa, Artificial Sequence
  Synthetically generated peptide
  VARIANT (1)..(17): Xaa = Any Amino Acid
CCXXELXCCNPACTXGC

SEQ ID NO: 2839 - protein, 17 aa, Artificial Sequence
  Synthetically generated peptide
  VARIANT (1)..(17): Xaa = Any Amino Acid
CCXXELXCCNPACTGXC

SEQ ID NO: 2840 - protein, 16 aa, Artificial Sequence
  Synthetically generated peptide
  VARIANT (1)..(16): Xaa = Any Amino Acid
CCXXELCCXNPACTGC

SEQ ID NO: 2841 - protein, 17 aa, Artificial Sequence
  Synthetically generated peptide
  VARIANT (1)..(17): Xaa = Any Amino Acid
CCXXELCCXXNPACTGC

SEQ ID NO: 2842 - protein, 17 aa, Artificial Sequence
  Synthetically generated peptide
  VARIANT (1)..(17): Xaa = Any Amino Acid
CCXXELCCXNXPACTGC

SEQ ID NO: 2843 - protein, 17 aa, Artificial Sequence
  Synthetically generated peptide
  VARIANT (1)..(17): Xaa = Any Amino Acid
CCXXELCCXNPXACTGC

SEQ ID NO: 2844 - protein, 17 aa, Artificial Sequence
  Synthetically generated peptide
  VARIANT (1)..(17): Xaa = Any Amino Acid
CCXXELCCXNPAXCTGC

SEQ ID NO: 2845 - protein, 17 aa, Artificial Sequence
  Synthetically generated peptide
  VARIANT (1)..(17): Xaa = Any Amino Acid
CCXXELCCXNPACXTGC

SEQ ID NO: 2846 - protein, 17 aa, Artificial Sequence
  Synthetically generated peptide
  VARIANT (1)..(17): Xaa = Any Amino Acid
CCXXELCCXNPACTXGC

SEQ ID NO: 2847 - protein, 17 aa, Artificial Sequence
  Synthetically generated peptide
  VARIANT (1)..(17): Xaa = Any Amino Acid
CCXXELCCXNPACTGXC

SEQ ID NO: 2848 - protein, 16 aa, Artificial Sequence
  Synthetically generated peptide
  VARIANT (1)..(16): Xaa = Any Amino Acid
CCXXELCCNXPACTGC

SEQ ID NO: 2849 - protein, 17 aa, Artificial Sequence
  Synthetically generated peptide
  VARIANT (1)..(17): Xaa = Any Amino Acid
CCXXELCCNXXPACTGC

SEQ ID NO: 2850 - protein, 17 aa, Artificial Sequence
  Synthetically generated peptide
  VARIANT (1)..(17): Xaa = Any Amino Acid
CCXXELCCNXPXACTGC

SEQ ID NO: 2851 - protein, 17 aa, Artificial Sequence
  Synthetically generated peptide
  VARIANT (1)..(17): Xaa = Any Amino Acid
CCXXELCCNXPAXCTGC

SEQ ID NO: 2852 - protein, 17 aa, Artificial Sequence
  Synthetically generated peptide
  VARIANT (1)..(17): Xaa = Any Amino Acid
CCXXELCCNXPACXTGC

SEQ ID NO: 2853 - protein, 17 aa, Artificial Sequence
  Synthetically generated peptide
  VARIANT (1)..(17): Xaa = Any Amino Acid
CCXXELCCNXPACTXGC

SEQ ID NO: 2854 - protein, 17 aa, Artificial Sequence
  Synthetically generated peptide
  VARIANT (1)..(17): Xaa = Any Amino Acid
CCXXELCCNXPACTGXC

SEQ ID NO: 2855 - protein, 16 aa, Artificial Sequence
  Synthetically generated peptide
  VARIANT (1)..(16): Xaa = Any Amino Acid
CCXXELCCNPXACTGC

SEQ ID NO: 2856 - protein, 17 aa, Artificial Sequence
  Synthetically generated peptide
  VARIANT (1)..(17): Xaa = Any Amino Acid
CCXXELCCNPXXACTGC

SEQ ID NO: 2857 - protein, 17 aa, Artificial Sequence
  Synthetically generated peptide
  VARIANT (1)..(17): Xaa = Any Amino Acid
CCXXELCCNPXAXCTGC

SEQ ID NO: 2858 - protein, 17 aa, Artificial Sequence
  Synthetically generated peptide
  VARIANT (1)..(17): Xaa = Any Amino Acid
CCXXELCCNPXACXTGC

SEQ ID NO: 2859 - protein, 17 aa, Artificial Sequence
  Synthetically generated peptide
  VARIANT (1)..(17): Xaa = Any Amino Acid
CCXXELCCNPXACTXGC

SEQ ID NO: 2860 - protein, 17 aa, Artificial Sequence
  Synthetically generated peptide
  VARIANT (1)..(17): Xaa = Any Amino Acid
CCXXELCCNPXACTGXC

SEQ ID NO: 2861 - protein, 16 aa, Artificial Sequence
  Synthetically generated peptide
  VARIANT (1)..(16): Xaa = Any Amino Acid
CCXXELCCNPAXCTGC

SEQ ID NO: 2862 - protein, 17 aa, Artificial Sequence
  Synthetically generated peptide
  VARIANT (1)..(17): Xaa = Any Amino Acid
CCXXELCCNPAXXCTGC

SEQ ID NO: 2863 - protein, 17 aa, Artificial Sequence
  Synthetically generated peptide
  VARIANT (1)..(17): Xaa = Any Amino Acid
CCXXELCCNPAXCXTGC

SEQ ID NO: 2864 - protein, 17 aa, Artificial Sequence
  Synthetically generated peptide
  VARIANT (1)..(17): Xaa = Any Amino Acid
CCXXELCCNPAXCTXGC

SEQ ID NO: 2865 - protein, 17 aa, Artificial Sequence
  Synthetically generated peptide
  VARIANT (1)..(17): Xaa = Any Amino Acid
CCXXELCCNPAXCTGXC

SEQ ID NO: 2866 - protein, 16 aa, Artificial Sequence
  Synthetically generated peptide
  VARIANT (1)..(16): Xaa = Any Amino Acid
CCXXELCCNPACXTGC

SEQ ID NO: 2867 - protein, 17 aa, Artificial Sequence
  Synthetically generated peptide
  VARIANT (1)..(17): Xaa = Any Amino Acid
CCXXELCCNPACXXTGC

SEQ ID NO: 2868 - protein, 17 aa, Artificial Sequence
  Synthetically generated peptide
  VARIANT (1)..(17): Xaa = Any Amino Acid
CCXXELCCNPACXTXGC

SEQ ID NO: 2869 - protein, 17 aa, Artificial Sequence
  Synthetically generated peptide
  VARIANT (1)..(17): Xaa = Any Amino Acid
CCXXELCCNPACXTGXC

SEQ ID NO: 2870 - protein, 16 aa, Artificial Sequence
  Synthetically generated peptide
  VARIANT (1)..(16): Xaa = Any Amino Acid
CCXXELCCNPACTXGC

SEQ ID NO: 2871 - protein, 17 aa, Artificial Sequence
  Synthetically generated peptide
  VARIANT (1)..(17): Xaa = Any Amino Acid
CCXXELCCNPACTXXGC

SEQ ID NO: 2872 - protein, 17 aa, Artificial Sequence
  Synthetically generated peptide
  VARIANT (1)..(17): Xaa = Any Amino Acid
CCXXELCCNPACTXGXC

SEQ ID NO: 2873 - protein, 16 aa, Artificial Sequence
  Synthetically generated peptide
  VARIANT (1)..(16): Xaa = Any Amino Acid
CCXXELCCNPACTGXC

SEQ ID NO: 2874 - protein, 17 aa, Artificial Sequence
  Synthetically generated peptide
  VARIANT (1)..(17): Xaa = Any Amino Acid
CCXXELCCNPACTGXXC

SEQ ID NO: 2875 - protein, 15 aa, Artificial Sequence
  Synthetically generated peptide
  VARIANT (1)..(15): Xaa = Any Amino Acid
CCXEXLCCNPACTGC

SEQ ID NO: 2876 - protein, 16 aa, Artificial Sequence
  Synthetically generated peptide
  VARIANT (1)..(16): Xaa = Any Amino Acid
CCXEXXLCCNPACTGC

SEQ ID NO: 2877 - protein, 17 aa, Artificial Sequence
  Synthetically generated peptide
  VARIANT (1)..(17): Xaa = Any Amino Acid
CCXEXXXLCCNPACTGC

SEQ ID NO: 2878 - protein, 17 aa, Artificial Sequence
  Synthetically generated peptide
  VARIANT (1)..(17): Xaa = Any Amino Acid
CCXEXXLXCCNPACTGC

SEQ ID NO: 2879 - protein, 17 aa, Artificial Sequence
  Synthetically generated peptide
  VARIANT (1)..(17): Xaa = Any Amino Acid
CCXEXXLCCXNPACTGC

SEQ ID NO: 2880 - protein, 17 aa, Artificial Sequence
  Synthetically generated peptide
  VARIANT (1)..(17): Xaa = Any Amino Acid
CCXEXXLCCNXPACTGC

SEQ ID NO: 2881 - protein, 17 aa, Artificial Sequence
  Synthetically generated peptide
  VARIANT (1)..(17): Xaa = Any Amino Acid
CCXEXXLCCNPXACTGC

SEQ ID NO: 2882 - protein, 17 aa, Artificial Sequence
  Synthetically generated peptide
  VARIANT (1)..(17): Xaa = Any Amino Acid
CCXEXXLCCNPAXCTGC

SEQ ID NO: 2883 - protein, 17 aa, Artificial Sequence
  Synthetically generated peptide
  VARIANT (1)..(17): Xaa = Any Amino Acid
CCXEXXLCCNPACXTGC

SEQ ID NO: 2884 - protein, 17 aa, Artificial Sequence
  Synthetically generated peptide
  VARIANT (1)..(17): Xaa = Any Amino Acid
CCXEXXLCCNPACTXGC

SEQ ID NO: 2885 - protein, 17 aa, Artificial Sequence
  Synthetically generated peptide
  VARIANT (1)..(17): Xaa = Any Amino Acid
CCXEXXLCCNPACTGXC

SEQ ID NO: 2886 - protein, 16 aa, Artificial Sequence
  Synthetically generated peptide
  VARIANT (1)..(16): Xaa = Any Amino Acid
CCXEXLXCCNPACTGC

SEQ ID NO: 2887 - protein, 17 aa, Artificial Sequence
  Synthetically generated peptide
  VARIANT (1)..(17): Xaa = Any Amino Acid
CCXEXLXXCCNPACTGC

SEQ ID NO: 2888 - protein, 17 aa, Artificial Sequence
  Synthetically generated peptide
  VARIANT (1)..(17): Xaa = Any Amino Acid
CCXEXLXCCXNPACTGC

SEQ ID NO: 2889 - protein, 17 aa, Artificial Sequence
  Synthetically generated peptide
  VARIANT (1)..(17): Xaa = Any Amino Acid
CCXEXLXCCNXPACTGC

SEQ ID NO: 2890 - protein, 17 aa, Artificial Sequence
  Synthetically generated peptide
  VARIANT (1)..(17): Xaa = Any Amino Acid
CCXEXLXCCNPXACTGC

SEQ ID NO: 2891 - protein, 17 aa, Artificial Sequence
  Synthetically generated peptide
  VARIANT (1)..(17): Xaa = Any Amino Acid
CCXEXLXCCNPAXCTGC

SEQ ID NO: 2892 - protein, 17 aa, Artificial Sequence
  Synthetically generated peptide
  VARIANT (1)..(17): Xaa = Any Amino Acid
CCXEXLXCCNPACXTGC

SEQ ID NO: 2893 - protein, 17 aa, Artificial Sequence
  Synthetically generated peptide
  VARIANT (1)..(17): Xaa = Any Amino Acid
CCXEXLXCCNPACTXGC

SEQ ID NO: 2894 - protein, 17 aa, Artificial Sequence
  Synthetically generated peptide
  VARIANT (1)..(17): Xaa = Any Amino Acid
CCXEXLXCCNPACTGXC

SEQ ID NO: 2895 - protein, 16 aa, Artificial Sequence
  Synthetically generated peptide
  VARIANT (1)..(16): Xaa = Any Amino Acid
CCXEXLCCXNPACTGC

SEQ ID NO: 2896 - protein, 17 aa, Artificial Sequence
  Synthetically generated peptide
  VARIANT (1)..(17): Xaa = Any Amino Acid
CCXEXLCCXXNPACTGC

SEQ ID NO: 2897 - protein, 17 aa, Artificial Sequence
  Synthetically generated peptide
  VARIANT (1)..(17): Xaa = Any Amino Acid
CCXEXLCCXNXPACTGC

SEQ ID NO: 2898 - protein, 17 aa, Artificial Sequence
  Synthetically generated peptide
  VARIANT (1)..(17): Xaa = Any Amino Acid
CCXEXLCCXNPXACTGC

SEQ ID NO: 2899 - protein, 17 aa, Artificial Sequence
  Synthetically generated peptide
  VARIANT (1)..(17): Xaa = Any Amino Acid
CCXEXLCCXNPAXCTGC

SEQ ID NO: 2900 - protein, 17 aa, Artificial Sequence
  Synthetically generated peptide
  VARIANT (1)..(17): Xaa = Any Amino Acid
CCXEXLCCXNPACXTGC

SEQ ID NO: 2901 - protein, 17 aa, Artificial Sequence
  Synthetically generated peptide
  VARIANT (1)..(17): Xaa = Any Amino Acid
CCXEXLCCXNPACTXGC

SEQ ID NO: 2902 - protein, 17 aa, Artificial Sequence
  Synthetically generated peptide
  VARIANT (1)..(17): Xaa = Any Amino Acid
CCXEXLCCXNPACTGXC

SEQ ID NO: 2903 - protein, 16 aa, Artificial Sequence
  Synthetically generated peptide
  VARIANT (1)..(16): Xaa = Any Amino Acid
CCXEXLCCNXPACTGC

SEQ ID NO: 2904 - protein, 17 aa, Artificial Sequence
  Synthetically generated peptide
  VARIANT (1)..(17): Xaa = Any Amino Acid
CCXEXLCCNXXPACTGC

SEQ ID NO: 2905 - protein, 17 aa, Artificial Sequence
  Synthetically generated peptide
  VARIANT (1)..(17): Xaa = Any Amino Acid
CCXEXLCCNXPXACTGC

SEQ ID NO: 2906 - protein, 17 aa, Artificial Sequence
  Synthetically generated peptide
  VARIANT (1)..(17): Xaa = Any Amino Acid
CCXEXLCCNXPAXCTGC

SEQ ID NO: 2907 - protein, 17 aa, Artificial Sequence
  Synthetically generated peptide
  VARIANT (1)..(17): Xaa = Any Amino Acid
CCXEXLCCNXPACXTGC

SEQ ID NO: 2908 - protein, 17 aa, Artificial Sequence
  Synthetically generated peptide
  VARIANT (1)..(17): Xaa = Any Amino Acid
CCXEXLCCNXPACTXGC

SEQ ID NO: 2909 - protein, 17 aa, Artificial Sequence
  Synthetically generated peptide
  VARIANT (1)..(17): Xaa = Any Amino Acid
CCXEXLCCNXPACTGXC

SEQ ID NO: 2910 - protein, 16 aa, Artificial Sequence
  Synthetically generated peptide
  VARIANT (1)..(16): Xaa = Any Amino Acid
CCXEXLCCNPXACTGC

SEQ ID NO: 2911 - protein, 17 aa, Artificial Sequence
  Synthetically generated peptide
  VARIANT (1)..(17): Xaa = Any Amino Acid
CCXEXLCCNPXXACTGC

SEQ ID NO: 2912 - protein, 17 aa, Artificial Sequence
  Synthetically generated peptide
  VARIANT (1)..(17): Xaa = Any Amino Acid
CCXEXLCCNPXAXCTGC

SEQ ID NO: 2913 - protein, 17 aa, Artificial Sequence
  Synthetically generated peptide
  VARIANT (1)..(17): Xaa = Any Amino Acid
CCXEXLCCNPXACXTGC

SEQ ID NO: 2914 - protein, 17 aa, Artificial Sequence
  Synthetically generated peptide
  VARIANT (1)..(17): Xaa = Any Amino Acid
CCXEXLCCNPXACTXGC

SEQ ID NO: 2915 - protein, 17 aa, Artificial Sequence
  Synthetically generated peptide
  VARIANT (1)..(17): Xaa = Any Amino Acid
CCXEXLCCNPXACTGXC

SEQ ID NO: 2916 - protein, 16 aa, Artificial Sequence
  Synthetically generated peptide
  VARIANT (1)..(16): Xaa = Any Amino Acid
CCXEXLCCNPAXCTGC

SEQ ID NO: 2917 - protein, 17 aa, Artificial Sequence
  Synthetically generated peptide
  VARIANT (1)..(17): Xaa = Any Amino Acid
CCXEXLCCNPAXXCTGC

SEQ ID NO: 2918 - protein, 17 aa, Artificial Sequence
  Synthetically generated peptide
  VARIANT (1)..(17): Xaa = Any Amino Acid
CCXEXLCCNPAXCXTGC

SEQ ID NO: 2919 - protein, 17 aa, Artificial Sequence
  Synthetically generated peptide
  VARIANT (1)..(17): Xaa = Any Amino Acid
CCXEXLCCNPAXCTXGC

SEQ ID NO: 2920 - protein, 17 aa, Artificial Sequence
  Synthetically generated peptide
  VARIANT (1)..(17): Xaa = Any Amino Acid
CCXEXLCCNPAXCTGXC

SEQ ID NO: 2921 - protein, 16 aa, Artificial Sequence
  Synthetically generated peptide
  VARIANT (1)..(16): Xaa = Any Amino Acid
CCXEXLCCNPACXTGC

SEQ ID NO: 2922 - protein, 17 aa, Artificial Sequence
  Synthetically generated peptide
  VARIANT (1)..(17): Xaa = Any Amino Acid
CCXEXLCCNPACXXTGC

SEQ ID NO: 2923 - protein, 17 aa, Artificial Sequence
  Synthetically generated peptide
  VARIANT (1)..(17): Xaa = Any Amino Acid
CCXEXLCCNPACXTXGC

SEQ ID NO: 2924 - protein, 17 aa, Artificial Sequence
  Synthetically generated peptide
  VARIANT (1)..(17): Xaa = Any Amino Acid
CCXEXLCCNPACXTGXC

SEQ ID NO: 2925 - protein, 16 aa, Artificial Sequence
  Synthetically generated peptide
  VARIANT (1)..(16): Xaa = Any Amino Acid
CCXEXLCCNPACTXGC

SEQ ID NO: 2926 - protein, 17 aa, Artificial Sequence
  Synthetically generated peptide
  VARIANT (1)..(17): Xaa = Any Amino Acid
CCXEXLCCNPACTXXGC

SEQ ID NO: 2927 - protein, 17 aa, Artificial Sequence
  Synthetically generated peptide
  VARIANT (1)..(17): Xaa = Any Amino Acid
CCXEXLCCNPACTXGXC

SEQ ID NO: 2928 - protein, 16 aa, Artificial Sequence
  Synthetically generated peptide
  VARIANT (1)..(16): Xaa = Any Amino Acid
CCXEXLCCNPACTGXC

SEQ ID NO: 2929 - protein, 17 aa, Artificial Sequence
  Synthetically generated peptide
  VARIANT (1)..(17): Xaa = Any Amino Acid
CCXEXLCCNPACTGXXC

SEQ ID NO: 2930 - protein, 15 aa, Artificial Sequence
  Synthetically generated peptide
  VARIANT (1)..(15): Xaa = Any Amino Acid
CCXELXCCNPACTGC

SEQ ID NO: 2931 - protein, 16 aa, Artificial Sequence
  Synthetically generated peptide
  VARIANT (1)..(16): Xaa = Any Amino Acid
CCXELXXCCNPACTGC

SEQ ID NO: 2932 - protein, 17 aa, Artificial Sequence
  Synthetically generated peptide
  VARIANT (1)..(17): Xaa = Any Amino Acid
CCXELXXXCCNPACTGC

SEQ ID NO: 2933 - protein, 17 aa, Artificial Sequence
  Synthetically generated peptide
  VARIANT (1)..(17): Xaa = Any Amino Acid
CCXELXXCCXNPACTGC

SEQ ID NO: 2934 - protein, 17 aa, Artificial Sequence
  Synthetically generated peptide
  VARIANT (1)..(17): Xaa = Any Amino Acid
CCXELXXCCNXPACTGC

SEQ ID NO: 2935 - protein, 17 aa, Artificial Sequence
  Synthetically generated peptide
  VARIANT (1)..(17): Xaa = Any Amino Acid
CCXELXXCCNPXACTGC

SEQ ID NO: 2936 - protein, 17 aa, Artificial Sequence
  Synthetically generated peptide
  VARIANT (1)..(17): Xaa = Any Amino Acid
CCXELXXCCNPAXCTGC

SEQ ID NO: 2937 - protein, 17 aa, Artificial Sequence
  Synthetically generated peptide
  VARIANT (1)..(17): Xaa = Any Amino Acid
CCXELXXCCNPACXTGC

SEQ ID NO: 2938 - protein, 17 aa, Artificial Sequence
  Synthetically generated peptide
  VARIANT (1)..(17): Xaa = Any Amino Acid
CCXELXXCCNPACTXGC

SEQ ID NO: 2939 - protein, 17 aa, Artificial Sequence
  Synthetically generated peptide
  VARIANT (1)..(17): Xaa = Any Amino Acid
CCXELXXCCNPACTGXC

SEQ ID NO: 2940 - protein, 16 aa, Artificial Sequence
  Synthetically generated peptide
  VARIANT (1)..(16): Xaa = Any Amino Acid
CCXELXCCXNPACTGC

SEQ ID NO: 2941 - protein, 17 aa, Artificial Sequence
  Synthetically generated peptide
  VARIANT (1)..(17): Xaa = Any Amino Acid
CCXELXCCXXNPACTGC

SEQ ID NO: 2942 - protein, 17 aa, Artificial Sequence
  Synthetically generated peptide
  VARIANT (1)..(17): Xaa = Any Amino Acid
CCXELXCCXNXPACTGC

SEQ ID NO: 2943 - protein, 17 aa, Artificial Sequence
  Synthetically generated peptide
  VARIANT (1)..(17): Xaa = Any Amino Acid
CCXELXCCXNPXACTGC

SEQ ID NO: 2944 - protein, 17 aa, Artificial Sequence
  Synthetically generated peptide
  VARIANT (1)..(17): Xaa = Any Amino Acid
CCXELXCCXNPAXCTGC

SEQ ID NO: 2945 - protein, 17 aa, Artificial Sequence
  Synthetically generated peptide
  VARIANT (1)..(17): Xaa = Any Amino Acid
CCXELXCCXNPACXTGC

SEQ ID NO: 2946 - protein, 17 aa, Artificial Sequence
  Synthetically generated peptide
  VARIANT (1)..(17): Xaa = Any Amino Acid
CCXELXCCXNPACTXGC

SEQ ID NO: 2947 - protein, 17 aa, Artificial Sequence
  Synthetically generated peptide
  VARIANT (1)..(17): Xaa = Any Amino Acid
CCXELXCCXNPACTGXC

SEQ ID NO: 2948 - protein, 16 aa, Artificial Sequence
  Synthetically generated peptide
  VARIANT (1)..(16): Xaa = Any Amino Acid
CCXELXCCNXPACTGC

SEQ ID NO: 2949 - protein, 17 aa, Artificial Sequence
  Synthetically generated peptide
  VARIANT (1)..(17): Xaa = Any Amino Acid
CCXELXCCNXXPACTGC

SEQ ID NO: 2950 - protein, 17 aa, Artificial Sequence
  Synthetically generated peptide
  VARIANT (1)..(17): Xaa = Any Amino Acid
CCXELXCCNXPXACTGC

SEQ ID NO: 2951 - protein, 17 aa, Artificial Sequence
  Synthetically generated peptide
  VARIANT (1)..(17): Xaa = Any Amino Acid
CCXELXCCNXPAXCTGC

SEQ ID NO: 2952 - protein, 17 aa, Artificial Sequence
  Synthetically generated peptide
  VARIANT (1)..(17): Xaa = Any Amino Acid
CCXELXCCNXPACXTGC

SEQ ID NO: 2953 - protein, 17 aa, Artificial Sequence
  Synthetically generated peptide
  VARIANT (1)..(17): Xaa = Any Amino Acid
CCXELXCCNXPACTXGC

SEQ ID NO: 2954 - protein, 17 aa, Artificial Sequence
  Synthetically generated peptide
  VARIANT (1)..(17): Xaa = Any Amino Acid
CCXELXCCNXPACTGXC

SEQ ID NO: 2955 - protein, 16 aa, Artificial Sequence
  Synthetically generated peptide
  VARIANT (1)..(16): Xaa = Any Amino Acid
CCXELXCCNPXACTGC

SEQ ID NO: 2956 - protein, 17 aa, Artificial Sequence
  Synthetically generated peptide
  VARIANT (1)..(17): Xaa = Any Amino Acid
CCXELXCCNPXXACTGC

SEQ ID NO: 2957 - protein, 17 aa, Artificial Sequence
  Synthetically generated peptide
  VARIANT (1)..(17): Xaa = Any Amino Acid
CCXELXCCNPXAXCTGC

SEQ ID NO: 2958 - protein, 17 aa, Artificial Sequence
  Synthetically generated peptide
  VARIANT (1)..(17): Xaa = Any Amino Acid
CCXELXCCNPXACXTGC

SEQ ID NO: 2959 - protein, 17 aa, Artificial Sequence
  Synthetically generated peptide
  VARIANT (1)..(17): Xaa = Any Amino Acid
CCXELXCCNPXACTXGC

SEQ ID NO: 2960 - protein, 17 aa, Artificial Sequence
  Synthetically generated peptide
  VARIANT (1)..(17): Xaa = Any Amino Acid
CCXELXCCNPXACTGXC

SEQ ID NO: 2961 - protein, 16 aa, Artificial Sequence
  Synthetically generated peptide
  VARIANT (1)..(16): Xaa = Any Amino Acid
CCXELXCCNPAXCTGC

SEQ ID NO: 2962 - protein, 17 aa, Artificial Sequence
  Synthetically generated peptide
  VARIANT (1)..(17): Xaa = Any Amino Acid
CCXELXCCNPAXXCTGC

SEQ ID NO: 2963 - protein, 17 aa, Artificial Sequence
  Synthetically generated peptide
  VARIANT (1)..(17): Xaa = Any Amino Acid
CCXELXCCNPAXCXTGC

SEQ ID NO: 2964 - protein, 17 aa, Artificial Sequence
  Synthetically generated peptide
  VARIANT (1)..(17): Xaa = Any Amino Acid
CCXELXCCNPAXCTXGC

SEQ ID NO: 2965 - protein, 17 aa, Artificial Sequence
  Synthetically generated peptide
  VARIANT (1)..(17): Xaa = Any Amino Acid
CCXELXCCNPAXCTGXC

SEQ ID NO: 2966 - protein, 16 aa, Artificial Sequence
  Synthetically generated peptide
  VARIANT (1)..(16): Xaa = Any Amino Acid
CCXELXCCNPACXTGC

SEQ ID NO: 2967 - protein, 17 aa, Artificial Sequence
  Synthetically generated peptide
  VARIANT (1)..(17): Xaa = Any Amino Acid
CCXELXCCNPACXXTGC

SEQ ID NO: 2968 - protein, 17 aa, Artificial Sequence
  Synthetically generated peptide
  VARIANT (1)..(17): Xaa = Any Amino Acid
CCXELXCCNPACXTXGC

SEQ ID NO: 2969 - protein, 17 aa, Artificial Sequence
  Synthetically generated peptide
  VARIANT (1)..(17): Xaa = Any Amino Acid
CCXELXCCNPACXTGXC

SEQ ID NO: 2970 - protein, 16 aa, Artificial Sequence
  Synthetically generated peptide
  VARIANT (1)..(16): Xaa = Any Amino Acid
CCXELXCCNPACTXGC

SEQ ID NO: 2971 - protein, 17 aa, Artificial Sequence
  Synthetically generated peptide
  VARIANT (1)..(17): Xaa = Any Amino Acid
CCXELXCCNPACTXXGC

SEQ ID NO: 2972 - protein, 17 aa, Artificial Sequence
  Synthetically generated peptide
  VARIANT (1)..(17): Xaa = Any Amino Acid
CCXELXCCNPACTXGXC

SEQ ID NO: 2973 - protein, 16 aa, Artificial Sequence
  Synthetically generated peptide
  VARIANT (1)..(16): Xaa = Any Amino Acid
CCXELXCCNPACTGXC

SEQ ID NO: 2974 - protein, 17 aa, Artificial Sequence
  Synthetically generated peptide
  VARIANT (1)..(17): Xaa = Any Amino Acid
CCXELXCCNPACTGXXC

SEQ ID NO: 2975 - protein, 15 aa, Artificial Sequence
  Synthetically generated peptide
  VARIANT (1)..(15): Xaa = Any Amino Acid
CCXELCCXNPACTGC

SEQ ID NO: 2976 - protein, 16 aa, Artificial Sequence
  Synthetically generated peptide
  VARIANT (1)..(16): Xaa = Any Amino Acid
CCXELCCXXNPACTGC

SEQ ID NO: 2977 - protein, 17 aa, Artificial Sequence
  Synthetically generated peptide
  VARIANT (1)..(17): Xaa = Any Amino Acid
CCXELCCXXXNPACTGC

SEQ ID NO: 2978 - protein, 17 aa, Artificial Sequence
  Synthetically generated peptide
  VARIANT (1)..(17): Xaa = Any Amino Acid
CCXELCCXXNXPACTGC

SEQ ID NO: 2979 - protein, 17 aa, Artificial Sequence
  Synthetically generated peptide
  VARIANT (1)..(17): Xaa = Any Amino Acid
CCXELCCXXNPXACTGC

SEQ ID NO: 2980 - protein, 17 aa, Artificial Sequence
  Synthetically generated peptide
  VARIANT (1)..(17): Xaa = Any Amino Acid
CCXELCCXXNPAXCTGC

SEQ ID NO: 2981 - protein, 17 aa, Artificial Sequence
  Synthetically generated peptide
  VARIANT (1)..(17): Xaa = Any Amino Acid
CCXELCCXXNPACXTGC

SEQ ID NO: 2982 - protein, 17 aa, Artificial Sequence
  Synthetically generated peptide
  VARIANT (1)..(17): Xaa = Any Amino Acid
CCXELCCXXNPACTXGC

SEQ ID NO: 2983 - protein, 17 aa, Artificial Sequence
  Synthetically generated peptide
  VARIANT (1)..(17): Xaa = Any Amino Acid
CCXELCCXXNPACTGXC

SEQ ID NO: 2984 - protein, 16 aa, Artificial Sequence
  Synthetically generated peptide
  VARIANT (1)..(16): Xaa = Any Amino Acid
CCXELCCXNXPACTGC

SEQ ID NO: 2985 - protein, 17 aa, Artificial Sequence
  Synthetically generated peptide
  VARIANT (1)..(17): Xaa = Any Amino Acid
CCXELCCXNXXPACTGC

SEQ ID NO: 2986 - protein, 17 aa, Artificial Sequence
  Synthetically generated peptide
  VARIANT (1)..(17): Xaa = Any Amino Acid
CCXELCCXNXPXACTGC

SEQ ID NO: 2987 - protein, 17 aa, Artificial Sequence
  Synthetically generated peptide
  VARIANT (1)..(17): Xaa = Any Amino Acid
CCXELCCXNXPAXCTGC

SEQ ID NO: 2988 - protein, 17 aa, Artificial Sequence
  Synthetically generated peptide
  VARIANT (1)..(17): Xaa = Any Amino Acid
CCXELCCXNXPACXTGC

SEQ ID NO: 2989 - protein, 17 aa, Artificial Sequence
  Synthetically generated peptide
  VARIANT (1)..(17): Xaa = Any Amino Acid
CCXELCCXNXPACTXGC

SEQ ID NO: 2990 - protein, 17 aa, Artificial Sequence
  Synthetically generated peptide
  VARIANT (1)..(17): Xaa = Any Amino Acid
CCXELCCXNXPACTGXC

SEQ ID NO: 2991 - protein, 16 aa, Artificial Sequence
  Synthetically generated peptide
  VARIANT (1)..(16): Xaa = Any Amino Acid
CCXELCCXNPXACTGC

SEQ ID NO: 2992 - protein, 17 aa, Artificial Sequence
  Synthetically generated peptide
  VARIANT (1)..(17): Xaa = Any Amino Acid
CCXELCCXNPXXACTGC

SEQ ID NO: 2993 - protein, 17 aa, Artificial Sequence
  Synthetically generated peptide
  VARIANT (1)..(17): Xaa = Any Amino Acid
CCXELCCXNPXAXCTGC

SEQ ID NO: 2994 - protein, 17 aa, Artificial Sequence
  Synthetically generated peptide
  VARIANT (1)..(17): Xaa = Any Amino Acid
CCXELCCXNPXACXTGC

SEQ ID NO: 2995 - protein, 17 aa, Artificial Sequence
  Synthetically generated peptide
  VARIANT (1)..(17): Xaa = Any Amino Acid
CCXELCCXNPXACTXGC

SEQ ID NO: 2996 - protein, 17 aa, Artificial Sequence
  Synthetically generated peptide
  VARIANT (1)..(17): Xaa = Any Amino Acid
CCXELCCXNPXACTGXC

SEQ ID NO: 2997 - protein, 16 aa, Artificial Sequence
  Synthetically generated peptide
  VARIANT (1)..(16): Xaa = Any Amino Acid
CCXELCCXNPAXCTGC

SEQ ID NO: 2998 - protein, 17 aa, Artificial Sequence
  Synthetically generated peptide
  VARIANT (1)..(17): Xaa = Any Amino Acid
CCXELCCXNPAXXCTGC

SEQ ID NO: 2999 - protein, 17 aa, Artificial Sequence
  Synthetically generated peptide
  VARIANT (1)..(17): Xaa = Any Amino Acid
CCXELCCXNPAXCXTGC

SEQ ID NO: 3000 - protein, 17 aa, Artificial Sequence
  Synthetically generated peptide
  VARIANT (1)..(17): Xaa = Any Amino Acid
CCXELCCXNPAXCTXGC

SEQ ID NO: 3001 - protein, 17 aa, Artificial Sequence
  Synthetically generated peptide
  VARIANT (1)..(17): Xaa = Any Amino Acid
CCXELCCXNPAXCTGXC

SEQ ID NO: 3002 - protein, 16 aa, Artificial Sequence
  Synthetically generated peptide
  VARIANT (1)..(16): Xaa = Any Amino Acid
CCXELCCXNPACXTGC

SEQ ID NO: 3003 - protein, 17 aa, Artificial Sequence
  Synthetically generated peptide
  VARIANT (1)..(17): Xaa = Any Amino Acid
CCXELCCXNPACXXTGC

SEQ ID NO: 3004 - protein, 17 aa, Artificial Sequence
  Synthetically generated peptide
  VARIANT (1)..(17): Xaa = Any Amino Acid
CCXELCCXNPACXTXGC

SEQ ID NO: 3005 - protein, 17 aa, Artificial Sequence
  Synthetically generated peptide
  VARIANT (1)..(17): Xaa = Any Amino Acid
CCXELCCXNPACXTGXC

SEQ ID NO: 3006 - protein, 16 aa, Artificial Sequence
  Synthetically generated peptide
  VARIANT (1)..(16): Xaa = Any Amino Acid
CCXELCCXNPACTXGC

SEQ ID NO: 3007 - protein, 17 aa, Artificial Sequence
  Synthetically generated peptide
  VARIANT (1)..(17): Xaa = Any Amino Acid
CCXELCCXNPACTXXGC

SEQ ID NO: 3008 - protein, 17 aa, Artificial Sequence
  Synthetically generated peptide
  VARIANT (1)..(17): Xaa = Any Amino Acid
CCXELCCXNPACTXGXC

SEQ ID NO: 3009 - protein, 16 aa, Artificial Sequence
  Synthetically generated peptide
  VARIANT (1)..(16): Xaa = Any Amino Acid
CCXELCCXNPACTGXC

SEQ ID NO: 3010 - protein, 17 aa, Artificial Sequence
  Synthetically generated peptide
  VARIANT (1)..(17): Xaa = Any Amino Acid
CCXELCCXNPACTGXXC

SEQ ID NO: 3011 - protein, 15 aa, Artificial Sequence
  Synthetically generated peptide
  VARIANT (1)..(15): Xaa = Any Amino Acid
CCXELCCNXPACTGC

SEQ ID NO: 3012 - protein, 16 aa, Artificial Sequence
  Synthetically generated peptide
  VARIANT (1)..(16): Xaa = Any Amino Acid
CCXELCCNXXPACTGC

SEQ ID NO: 3013 - protein, 17 aa, Artificial Sequence
  Synthetically generated peptide
  VARIANT (1)..(17): Xaa = Any Amino Acid
CCXELCCNXXXPACTGC

SEQ ID NO: 3014 - protein, 17 aa, Artificial Sequence
  Synthetically generated peptide
  VARIANT (1)..(17): Xaa = Any Amino Acid
CCXELCCNXXPXACTGC

SEQ ID NO: 3015 - protein, 17 aa, Artificial Sequence
  Synthetically generated peptide
  VARIANT (1)..(17): Xaa = Any Amino Acid
CCXELCCNXXPAXCTGC

SEQ ID NO: 3016 - protein, 17 aa, Artificial Sequence
  Synthetically generated peptide
  VARIANT (1)..(17): Xaa = Any Amino Acid
CCXELCCNXXPACXTGC

SEQ ID NO: 3017 - protein, 17 aa, Artificial Sequence
  Synthetically generated peptide
  VARIANT (1)..(17): Xaa = Any Amino Acid
CCXELCCNXXPACTXGC

SEQ ID NO: 3018 - protein, 17 aa, Artificial Sequence
  Synthetically generated peptide
  VARIANT (1)..(17): Xaa = Any Amino Acid
CCXELCCNXXPACTGXC

SEQ ID NO: 3019 - protein, 16 aa, Artificial Sequence
  Synthetically generated peptide
  VARIANT (1)..(16): Xaa = Any Amino Acid
CCXELCCNXPXACTGC

SEQ ID NO: 3020 - protein, 17 aa, Artificial Sequence
  Synthetically generated peptide
  VARIANT (1)..(17): Xaa = Any Amino Acid
CCXELCCNXPXXACTGC

SEQ ID NO: 3021 - protein, 17 aa, Artificial Sequence
  Synthetically generated peptide
  VARIANT (1)..(17): Xaa = Any Amino Acid
CCXELCCNXPXAXCTGC

SEQ ID NO: 3022 - protein, 17 aa, Artificial Sequence
  Synthetically generated peptide
  VARIANT (1)..(17): Xaa = Any Amino Acid
CCXELCCNXPXACXTGC

SEQ ID NO: 3023 - protein, 17 aa, Artificial Sequence
  Synthetically generated peptide
  VARIANT (1)..(17): Xaa = Any Amino Acid
CCXELCCNXPXACTXGC

SEQ ID NO: 3024 - protein, 17 aa, Artificial Sequence
  Synthetically generated peptide
  VARIANT (1)..(17): Xaa = Any Amino Acid
CCXELCCNXPXACTGXC

SEQ ID NO: 3025 - protein, 16 aa, Artificial Sequence
  Synthetically generated peptide
  VARIANT (1)..(16): Xaa = Any Amino Acid
CCXELCCNXPAXCTGC

SEQ ID NO: 3026 - protein, 17 aa, Artificial Sequence
  Synthetically generated peptide
  VARIANT (1)..(17): Xaa = Any Amino Acid
CCXELCCNXPAXXCTGC

SEQ ID NO: 3027 - protein, 17 aa, Artificial Sequence
  Synthetically generated peptide
  VARIANT (1)..(17): Xaa = Any Amino Acid
CCXELCCNXPAXCXTGC

SEQ ID NO: 3028 - protein, 17 aa, Artificial Sequence
  Synthetically generated peptide
  VARIANT (1)..(17): Xaa = Any Amino Acid
CCXELCCNXPAXCTXGC

SEQ ID NO: 3029 - protein, 17 aa, Artificial Sequence
  Synthetically generated peptide
  VARIANT (1)..(17): Xaa = Any Amino Acid
CCXELCCNXPAXCTGXC

SEQ ID NO: 3030 - protein, 16 aa, Artificial Sequence
  Synthetically generated peptide
  VARIANT (1)..(16): Xaa = Any Amino Acid
CCXELCCNXPACXTGC

SEQ ID NO: 3031 - protein, 17 aa, Artificial Sequence
  Synthetically generated peptide
  VARIANT (1)..(17): Xaa = Any Amino Acid
CCXELCCNXPACXXTGC

SEQ ID NO: 3032 - protein, 17 aa, Artificial Sequence
  Synthetically generated peptide
  VARIANT (1)..(17): Xaa = Any Amino Acid
CCXELCCNXPACXTXGC

SEQ ID NO: 3033 - protein, 17 aa, Artificial Sequence
  Synthetically generated peptide
  VARIANT (1)..(17): Xaa = Any Amino Acid
CCXELCCNXPACXTGXC

SEQ ID NO: 3034 - protein, 16 aa, Artificial Sequence
  Synthetically generated peptide
  VARIANT (1)..(16): Xaa = Any Amino Acid
CCXELCCNXPACTXGC

SEQ ID NO: 3035 - protein, 17 aa, Artificial Sequence
  Synthetically generated peptide
  VARIANT (1)..(17): Xaa = Any Amino Acid
CCXELCCNXPACTXXGC

SEQ ID NO: 3036 - protein, 17 aa, Artificial Sequence
  Synthetically generated peptide
  VARIANT (1)..(17): Xaa = Any Amino Acid
CCXELCCNXPACTXGXC

SEQ ID NO: 3037 - protein, 16 aa, Artificial Sequence
  Synthetically generated peptide
  VARIANT (1)..(16): Xaa = Any Amino Acid
CCXELCCNXPACTGXC

SEQ ID NO: 3038 - protein, 17 aa, Artificial Sequence
  Synthetically generated peptide
  VARIANT (1)..(17): Xaa = Any Amino Acid
CCXELCCNXPACTGXXC

SEQ ID NO: 3039 - protein, 15 aa, Artificial Sequence
  Synthetically generated peptide
  VARIANT (1)..(15): Xaa = Any Amino Acid
CCXELCCNPXACTGC

SEQ ID NO: 3040 - protein, 16 aa, Artificial Sequence
  Synthetically generated peptide
  VARIANT (1)..(16): Xaa = Any Amino Acid
CCXELCCNPXXACTGC

SEQ ID NO: 3041 - protein, 17 aa, Artificial Sequence
  Synthetically generated peptide
  VARIANT (1)..(17): Xaa = Any Amino Acid
CCXELCCNPXXXACTGC

SEQ ID NO: 3042 - protein, 17 aa, Artificial Sequence
  Synthetically generated peptide
  VARIANT (1)..(17): Xaa = Any Amino Acid
CCXELCCNPXXAXCTGC

SEQ ID NO: 3043 - protein, 17 aa, Artificial Sequence
  Synthetically generated peptide
  VARIANT (1)..(17): Xaa = Any Amino Acid
CCXELCCNPXXACXTGC

SEQ ID NO: 3044 - protein, 17 aa, Artificial Sequence
  Synthetically generated peptide
  VARIANT (1)..(17): Xaa = Any Amino Acid
CCXELCCNPXXACTXGC

SEQ ID NO: 3045 - protein, 17 aa, Artificial Sequence
  Synthetically generated peptide
  VARIANT (1)..(17): Xaa = Any Amino Acid
CCXELCCNPXXACTGXC

SEQ ID NO: 3046 - protein, 16 aa, Artificial Sequence
  Synthetically generated peptide
  VARIANT (1)..(16): Xaa = Any Amino Acid
CCXELCCNPXAXCTGC

SEQ ID NO: 3047 - protein, 17 aa, Artificial Sequence
  Synthetically generated peptide
  VARIANT (1)..(17): Xaa = Any Amino Acid
CCXELCCNPXAXXCTGC

SEQ ID NO: 3048 - protein, 17 aa, Artificial Sequence
  Synthetically generated peptide
  VARIANT (1)..(17): Xaa = Any Amino Acid
CCXELCCNPXAXCXTGC

SEQ ID NO: 3049 - protein, 17 aa, Artificial Sequence
  Synthetically generated peptide
  VARIANT (1)..(17): Xaa = Any Amino Acid
CCXELCCNPXAXCTXGC

SEQ ID NO: 3050 - protein, 17 aa, Artificial Sequence
  Synthetically generated peptide
  VARIANT (1)..(17): Xaa = Any Amino Acid
CCXELCCNPXAXCTGXC

SEQ ID NO: 3051 - protein, 16 aa, Artificial Sequence
  Synthetically generated peptide
  VARIANT (1)..(16): Xaa = Any Amino Acid
CCXELCCNPXACXTGC

SEQ ID NO: 3052 - protein, 17 aa, Artificial Sequence
  Synthetically generated peptide
  VARIANT (1)..(17): Xaa = Any Amino Acid
CCXELCCNPXACXXTGC

SEQ ID NO: 3053 - protein, 17 aa, Artificial Sequence
  Synthetically generated peptide
  VARIANT (1)..(17): Xaa = Any Amino Acid
CCXELCCNPXACXTXGC

SEQ ID NO: 3054 - protein, 17 aa, Artificial Sequence
  Synthetically generated peptide
  VARIANT (1)..(17): Xaa = Any Amino Acid
CCXELCCNPXACXTGXC

SEQ ID NO: 3055 - protein, 16 aa, Artificial Sequence
  Synthetically generated peptide
  VARIANT (1)..(16): Xaa = Any Amino Acid
CCXELCCNPXACTXGC

SEQ ID NO: 3056 - protein, 17 aa, Artificial Sequence
  Synthetically generated peptide
  VARIANT (1)..(17): Xaa = Any Amino Acid
CCXELCCNPXACTXXGC

SEQ ID NO: 3057 - protein, 17 aa, Artificial Sequence
  Synthetically generated peptide
  VARIANT (1)..(17): Xaa = Any Amino Acid
CCXELCCNPXACTXGXC

SEQ ID NO: 3058 - protein, 16 aa, Artificial Sequence
  Synthetically generated peptide
  VARIANT (1)..(16): Xaa = Any Amino Acid
CCXELCCNPXACTGXC

SEQ ID NO: 3059 - protein, 17 aa, Artificial Sequence
  Synthetically generated peptide
  VARIANT (1)..(17): Xaa = Any Amino Acid
CCXELCCNPXACTGXXC

SEQ ID NO: 3060 - protein, 15 aa, Artificial Sequence
  Synthetically generated peptide
  VARIANT (1)..(15): Xaa = Any Amino Acid
CCXELCCNPAXCTGC

SEQ ID NO: 3061 - protein, 16 aa, Artificial Sequence
  Synthetically generated peptide
  VARIANT (1)..(16): Xaa = Any Amino Acid
CCXELCCNPAXXCTGC

SEQ ID NO: 3062 - protein, 17 aa, Artificial Sequence
  Synthetically generated peptide
  VARIANT (1)..(17): Xaa = Any Amino Acid
CCXELCCNPAXXXCTGC

SEQ ID NO: 3063 - protein, 17 aa, Artificial Sequence
  Synthetically generated peptide
  VARIANT (1)..(17): Xaa = Any Amino Acid
CCXELCCNPAXXCXTGC

SEQ ID NO: 3064 - protein, 17 aa, Artificial Sequence
  Synthetically generated peptide
  VARIANT (1)..(17): Xaa = Any Amino Acid
CCXELCCNPAXXCTXGC

SEQ ID NO: 3065 - protein, 17 aa, Artificial Sequence
  Synthetically generated peptide
  VARIANT (1)..(17): Xaa = Any Amino Acid
CCXELCCNPAXXCTGXC

SEQ ID NO: 3066 - protein, 16 aa, Artificial Sequence
  Synthetically generated peptide
  VARIANT (1)..(16): Xaa = Any Amino Acid
CCXELCCNPAXCXTGC

SEQ ID NO: 3067 - protein, 17 aa, Artificial Sequence
  Synthetically generated peptide
  VARIANT (1)..(17): Xaa = Any Amino Acid
CCXELCCNPAXCXXTGC

SEQ ID NO: 3068 - protein, 17 aa, Artificial Sequence
  Synthetically generated peptide
  VARIANT (1)..(17): Xaa = Any Amino Acid
CCXELCCNPAXCXTXGC

SEQ ID NO: 3069 - protein, 17 aa, Artificial Sequence
  Synthetically generated peptide
  VARIANT (1)..(17): Xaa = Any Amino Acid
CCXELCCNPAXCXTGXC

SEQ ID NO: 3070 - protein, 16 aa, Artificial Sequence
  Synthetically generated peptide
  VARIANT (1)..(16): Xaa = Any Amino Acid
CCXELCCNPAXCTXGC

SEQ ID NO: 3071 - protein, 17 aa, Artificial Sequence
  Synthetically generated peptide
  VARIANT (1)..(17): Xaa = Any Amino Acid
CCXELCCNPAXCTXXGC

SEQ ID NO: 3072 - protein, 17 aa, Artificial Sequence
  Synthetically generated peptide
  VARIANT (1)..(17): Xaa = Any Amino Acid
CCXELCCNPAXCTXGXC

SEQ ID NO: 3073 - protein, 16 aa, Artificial Sequence
  Synthetically generated peptide
  VARIANT (1)..(16): Xaa = Any Amino Acid
CCXELCCNPAXCTGXC

SEQ ID NO: 3074 - protein, 17 aa, Artificial Sequence
  Synthetically generated peptide
  VARIANT (1)..(17): Xaa = Any Amino Acid
CCXELCCNPAXCTGXXC

SEQ ID NO: 3075 - protein, 15 aa, Artificial Sequence
  Synthetically generated peptide
  VARIANT (1)..(15): Xaa = Any Amino Acid
CCXELCCNPACXTGC

SEQ ID NO: 3076 - protein, 16 aa, Artificial Sequence
  Synthetically generated peptide
  VARIANT (1)..(16): Xaa = Any Amino Acid
CCXELCCNPACXXTGC

SEQ ID NO: 3077 - protein, 17 aa, Artificial Sequence
  Synthetically generated peptide
  VARIANT (1)..(17): Xaa = Any Amino Acid
CCXELCCNPACXXXTGC

SEQ ID NO: 3078 - protein, 17 aa, Artificial Sequence
  Synthetically generated peptide
  VARIANT (1)..(17): Xaa = Any Amino Acid
CCXELCCNPACXXTXGC

SEQ ID NO: 3079 - protein, 17 aa, Artificial Sequence
  Synthetically generated peptide
  VARIANT (1)..(17): Xaa = Any Amino Acid
CCXELCCNPACXXTGXC

SEQ ID NO: 3080 - protein, 16 aa, Artificial Sequence
  Synthetically generated peptide
  VARIANT (1)..(16): Xaa = Any Amino Acid
CCXELCCNPACXTXGC

SEQ ID NO: 3081 - protein, 17 aa, Artificial Sequence
  Synthetically generated peptide
  VARIANT (1)..(17): Xaa = Any Amino Acid
CCXELCCNPACXTXXGC

SEQ ID NO: 3082 - protein, 17 aa, Artificial Sequence
  Synthetically generated peptide
  VARIANT (1)..(17): Xaa = Any Amino Acid
CCXELCCNPACXTXGXC

SEQ ID NO: 3083 - protein, 16 aa, Artificial Sequence
  Synthetically generated peptide
  VARIANT (1)..(16): Xaa = Any Amino Acid
CCXELCCNPACXTGXC

SEQ ID NO: 3084 - protein, 17 aa, Artificial Sequence
  Synthetically generated peptide
  VARIANT (1)..(17): Xaa = Any Amino Acid
CCXELCCNPACXTGXXC

SEQ ID NO: 3085 - protein, 15 aa, Artificial Sequence
  Synthetically generated peptide
  VARIANT (1)..(15): Xaa = Any Amino Acid
CCXELCCNPACTXGC

SEQ ID NO: 3086 - protein, 16 aa, Artificial Sequence
  Synthetically generated peptide
  VARIANT (1)..(16): Xaa = Any Amino Acid
CCXELCCNPACTXXGC

SEQ ID NO: 3087 - protein, 17 aa, Artificial Sequence
  Synthetically generated peptide
  VARIANT (1)..(17): Xaa = Any Amino Acid
CCXELCCNPACTXXXGC

SEQ ID NO: 3088 - protein, 17 aa, Artificial Sequence
  Synthetically generated peptide
  VARIANT (1)..(17): Xaa = Any Amino Acid
CCXELCCNPACTXXGXC

SEQ ID NO: 3089 - protein, 16 aa, Artificial Sequence
  Synthetically generated peptide
  VARIANT (1)..(16): Xaa = Any Amino Acid
CCXELCCNPACTXGXC

SEQ ID NO: 3090 - protein, 17 aa, Artificial Sequence
  Synthetically generated peptide
  VARIANT (1)..(17): Xaa = Any Amino Acid
CCXELCCNPACTXGXXC

SEQ ID NO: 3091 - protein, 15 aa, Artificial Sequence
  Synthetically generated peptide
  VARIANT (1)..(15): Xaa = Any Amino Acid
CCXELCCNPACTGXC

SEQ ID NO: 3092 - protein, 16 aa, Artificial Sequence
  Synthetically generated peptide
  VARIANT (1)..(16): Xaa = Any Amino Acid
CCXELCCNPACTGXXC

SEQ ID NO: 3093 - protein, 17 aa, Artificial Sequence
  Synthetically generated peptide
  VARIANT (1)..(17): Xaa = Any Amino Acid
CCXELCCNPACTGXXXC

SEQ ID NO: 3094 - protein, 14 aa, Artificial Sequence
  Synthetically generated peptide
  VARIANT (1)..(14): Xaa = Any Amino Acid
CCEXLCCNPACTGC

SEQ ID NO: 3095 - protein, 15 aa, Artificial Sequence
  Synthetically generated peptide
  VARIANT (1)..(15): Xaa = Any Amino Acid
CCEXXLCCNPACTGC

SEQ ID NO: 3096 - protein, 16 aa, Artificial Sequence
  Synthetically generated peptide
  VARIANT (1)..(16): Xaa = Any Amino Acid
CCEXXXLCCNPACTGC

SEQ ID NO: 3097 - protein, 17 aa, Artificial Sequence
  Synthetically generated peptide
  VARIANT (1)..(17): Xaa = Any Amino Acid
CCEXXXXLCCNPACTGC

SEQ ID NO: 3098 - protein, 17 aa, Artificial Sequence
  Synthetically generated peptide
  VARIANT (1)..(17): Xaa = Any Amino Acid
CCEXXXLXCCNPACTGC

SEQ ID NO: 3099 - protein, 17 aa, Artificial Sequence
  Synthetically generated peptide
  VARIANT (1)..(17): Xaa = Any Amino Acid
CCEXXXLCCXNPACTGC

SEQ ID NO: 3100 - protein, 17 aa, Artificial Sequence
  Synthetically generated peptide
  VARIANT (1)..(17): Xaa = Any Amino Acid
CCEXXXLCCNXPACTGC

SEQ ID NO: 3101 - protein, 17 aa, Artificial Sequence
  Synthetically generated peptide
  VARIANT (1)..(17): Xaa = Any Amino Acid
CCEXXXLCCNPXACTGC

SEQ ID NO: 3102 - protein, 17 aa, Artificial Sequence
  Synthetically generated peptide
  VARIANT (1)..(17): Xaa = Any Amino Acid
CCEXXXLCCNPAXCTGC

SEQ ID NO: 3103 - protein, 17 aa, Artificial Sequence
  Synthetically generated peptide
  VARIANT (1)..(17): Xaa = Any Amino Acid
CCEXXXLCCNPACXTGC

SEQ ID NO: 3104 - protein, 17 aa, Artificial Sequence
  Synthetically generated peptide
  VARIANT (1)..(17): Xaa = Any Amino Acid
CCEXXXLCCNPACTXGC

SEQ ID NO: 3105 - protein, 17 aa, Artificial Sequence
  Synthetically generated peptide
  VARIANT (1)..(17): Xaa = Any Amino Acid
CCEXXXLCCNPACTGXC

SEQ ID NO: 3106 - protein, 16 aa, Artificial Sequence
  Synthetically generated peptide
  VARIANT (1)..(16): Xaa = Any Amino Acid
CCEXXLXCCNPACTGC

SEQ ID NO: 3107 - protein, 17 aa, Artificial Sequence
  Synthetically generated peptide
  VARIANT (1)..(17): Xaa = Any Amino Acid
CCEXXLXXCCNPACTGC

SEQ ID NO: 3108 - protein, 17 aa, Artificial Sequence
  Synthetically generated peptide
  VARIANT (1)..(17): Xaa = Any Amino Acid
CCEXXLXCCXNPACTGC

SEQ ID NO: 3109 - protein, 17 aa, Artificial Sequence
  Synthetically generated peptide
  VARIANT (1)..(17): Xaa = Any Amino Acid
CCEXXLXCCNXPACTGC

SEQ ID NO: 3110 - protein, 17 aa, Artificial Sequence
  Synthetically generated peptide
  VARIANT (1)..(17): Xaa = Any Amino Acid
CCEXXLXCCNPXACTGC

SEQ ID NO: 3111 - protein, 17 aa, Artificial Sequence
  Synthetically generated peptide
  VARIANT (1)..(17): Xaa = Any Amino Acid
CCEXXLXCCNPAXCTGC

SEQ ID NO: 3112 - protein, 17 aa, Artificial Sequence
  Synthetically generated peptide
  VARIANT (1)..(17): Xaa = Any Amino Acid
CCEXXLXCCNPACXTGC

SEQ ID NO: 3113 - protein, 17 aa, Artificial Sequence
  Synthetically generated peptide
  VARIANT (1)..(17): Xaa = Any Amino Acid
CCEXXLXCCNPACTXGC

SEQ ID NO: 3114 - protein, 17 aa, Artificial Sequence
  Synthetically generated peptide
  VARIANT (1)..(17): Xaa = Any Amino Acid
CCEXXLXCCNPACTGXC

SEQ ID NO: 3115 - protein, 16 aa, Artificial Sequence
  Synthetically generated peptide
  VARIANT (1)..(16): Xaa = Any Amino Acid
CCEXXLCCXNPACTGC

SEQ ID NO: 3116 - protein, 17 aa, Artificial Sequence
  Synthetically generated peptide
  VARIANT (1)..(17): Xaa = Any Amino Acid
CCEXXLCCXXNPACTGC

SEQ ID NO: 3117 - protein, 17 aa, Artificial Sequence
  Synthetically generated peptide
  VARIANT (1)..(17): Xaa = Any Amino Acid
CCEXXLCCXNXPACTGC

SEQ ID NO: 3118 - protein, 17 aa, Artificial Sequence
  Synthetically generated peptide
  VARIANT (1)..(17): Xaa = Any Amino Acid
CCEXXLCCXNPXACTGC

SEQ ID NO: 3119 - protein, 17 aa, Artificial Sequence
  Synthetically generated peptide
  VARIANT (1)..(17): Xaa = Any Amino Acid
CCEXXLCCXNPAXCTGC

SEQ ID NO: 3120 - protein, 17 aa, Artificial Sequence
  Synthetically generated peptide
  VARIANT (1)..(17): Xaa = Any Amino Acid
CCEXXLCCXNPACXTGC

SEQ ID NO: 3121 - protein, 17 aa, Artificial Sequence
  Synthetically generated peptide
  VARIANT (1)..(17): Xaa = Any Amino Acid
CCEXXLCCXNPACTXGC

SEQ ID NO: 3122 - protein, 17 aa, Artificial Sequence
  Synthetically generated peptide
  VARIANT (1)..(17): Xaa = Any Amino Acid
CCEXXLCCXNPACTGXC

SEQ ID NO: 3123 - protein, 16 aa, Artificial Sequence
  Synthetically generated peptide
  VARIANT (1)..(16): Xaa = Any Amino Acid
CCEXXLCCNXPACTGC

SEQ ID NO: 3124 - protein, 17 aa, Artificial Sequence
  Synthetically generated peptide
  VARIANT (1)..(17): Xaa = Any Amino Acid
CCEXXLCCNXXPACTGC

SEQ ID NO: 3125 - protein, 17 aa, Artificial Sequence
  Synthetically generated peptide
  VARIANT (1)..(17): Xaa = Any Amino Acid
CCEXXLCCNXPXACTGC

SEQ ID NO: 3126 - protein, 17 aa, Artificial Sequence
  Synthetically generated peptide
  VARIANT (1)..(17): Xaa = Any Amino Acid
CCEXXLCCNXPAXCTGC

SEQ ID NO: 3127 - protein, 17 aa, Artificial Sequence
  Synthetically generated peptide
  VARIANT (1)..(17): Xaa = Any Amino Acid
CCEXXLCCNXPACXTGC

SEQ ID NO: 3128 - protein, 17 aa, Artificial Sequence
  Synthetically generated peptide
  VARIANT (1)..(17): Xaa = Any Amino Acid
CCEXXLCCNXPACTXGC

SEQ ID NO: 3129 - protein, 17 aa, Artificial Sequence
  Synthetically generated peptide
  VARIANT (1)..(17): Xaa = Any Amino Acid
CCEXXLCCNXPACTGXC

SEQ ID NO: 3130 - protein, 16 aa, Artificial Sequence
  Synthetically generated peptide
  VARIANT (1)..(16): Xaa = Any Amino Acid
CCEXXLCCNPXACTGC

SEQ ID NO: 3131 - protein, 17 aa, Artificial Sequence
  Synthetically generated peptide
  VARIANT (1)..(17): Xaa = Any Amino Acid
CCEXXLCCNPXXACTGC

SEQ ID NO: 3132 - protein, 17 aa, Artificial Sequence
  Synthetically generated peptide
  VARIANT (1)..(17): Xaa = Any Amino Acid
CCEXXLCCNPXAXCTGC

SEQ ID NO: 3133 - protein, 17 aa, Artificial Sequence
  Synthetically generated peptide
  VARIANT (1)..(17): Xaa = Any Amino Acid
CCEXXLCCNPXACXTGC

SEQ ID NO: 3134 - protein, 17 aa, Artificial Sequence
  Synthetically generated peptide
  VARIANT (1)..(17): Xaa = Any Amino Acid
CCEXXLCCNPXACTXGC

SEQ ID NO: 3135 - protein, 17 aa, Artificial Sequence
  Synthetically generated peptide
  VARIANT (1)..(17): Xaa = Any Amino Acid
CCEXXLCCNPXACTGXC

SEQ ID NO: 3136 - protein, 16 aa, Artificial Sequence
  Synthetically generated peptide
  VARIANT (1)..(16): Xaa = Any Amino Acid
CCEXXLCCNPAXCTGC

SEQ ID NO: 3137 - protein, 17 aa, Artificial Sequence
  Synthetically generated peptide
  VARIANT (1)..(17): Xaa = Any Amino Acid
CCEXXLCCNPAXXCTGC

SEQ ID NO: 3138 - protein, 17 aa, Artificial Sequence
  Synthetically generated peptide
  VARIANT (1)..(17): Xaa = Any Amino Acid
CCEXXLCCNPAXCXTGC

SEQ ID NO: 3139 - protein, 17 aa, Artificial Sequence
  Synthetically generated peptide
  VARIANT (1)..(17): Xaa = Any Amino Acid
CCEXXLCCNPAXCTXGC

SEQ ID NO: 3140 - protein, 17 aa, Artificial Sequence
  Synthetically generated peptide
  VARIANT (1)..(17): Xaa = Any Amino Acid
CCEXXLCCNPAXCTGXC

SEQ ID NO: 3141 - protein, 16 aa, Artificial Sequence
  Synthetically generated peptide
  VARIANT (1)..(16): Xaa = Any Amino Acid
CCEXXLCCNPACXTGC

SEQ ID NO: 3142 - protein, 17 aa, Artificial Sequence
  Synthetically generated peptide
  VARIANT (1)..(17): Xaa = Any Amino Acid
CCEXXLCCNPACXXTGC

SEQ ID NO: 3143 - protein, 17 aa, Artificial Sequence
  Synthetically generated peptide
  VARIANT (1)..(17): Xaa = Any Amino Acid
CCEXXLCCNPACXTXGC

SEQ ID NO: 3144 - protein, 17 aa, Artificial Sequence
  Synthetically generated peptide
  VARIANT (1)..(17): Xaa = Any Amino Acid
CCEXXLCCNPACXTGXC

SEQ ID NO: 3145 - protein, 16 aa, Artificial Sequence
  Synthetically generated peptide
  VARIANT (1)..(16): Xaa = Any Amino Acid
CCEXXLCCNPACTXGC

SEQ ID NO: 3146 - protein, 17 aa, Artificial Sequence
  Synthetically generated peptide
  VARIANT (1)..(17): Xaa = Any Amino Acid
CCEXXLCCNPACTXXGC

SEQ ID NO: 3147 - protein, 17 aa, Artificial Sequence
  Synthetically generated peptide
  VARIANT (1)..(17): Xaa = Any Amino Acid
CCEXXLCCNPACTXGXC

SEQ ID NO: 3148 - protein, 16 aa, Artificial Sequence
  Synthetically generated peptide
  VARIANT (1)..(16): Xaa = Any Amino Acid
CCEXXLCCNPACTGXC

SEQ ID NO: 3149 - protein, 17 aa, Artificial Sequence
  Synthetically generated peptide
  VARIANT (1)..(17): Xaa = Any Amino Acid
CCEXXLCCNPACTGXXC

SEQ ID NO: 3150 - protein, 15 aa, Artificial Sequence
  Synthetically generated peptide
  VARIANT (1)..(15): Xaa = Any Amino Acid
CCEXLXCCNPACTGC

SEQ ID NO: 3151 - protein, 16 aa, Artificial Sequence
  Synthetically generated peptide
  VARIANT (1)..(16): Xaa = Any Amino Acid
CCEXLXXCCNPACTGC

SEQ ID NO: 3152 - protein, 17 aa, Artificial Sequence
  Synthetically generated peptide
  VARIANT (1)..(17): Xaa = Any Amino Acid
CCEXLXXXCCNPACTGC

SEQ ID NO: 3153 - protein, 17 aa, Artificial Sequence
  Synthetically generated peptide
  VARIANT (1)..(17): Xaa = Any Amino Acid
CCEXLXXCCXNPACTGC

SEQ ID NO: 3154 - protein, 17 aa, Artificial Sequence
  Synthetically generated peptide
  VARIANT (1)..(17): Xaa = Any Amino Acid
CCEXLXXCCNXPACTGC

SEQ ID NO: 3155 - protein, 17 aa, Artificial Sequence
  Synthetically generated peptide
  VARIANT (1)..(17): Xaa = Any Amino Acid
CCEXLXXCCNPXACTGC

SEQ ID NO: 3156 - protein, 17 aa, Artificial Sequence
  Synthetically generated peptide
  VARIANT (1)..(17): Xaa = Any Amino Acid
CCEXLXXCCNPAXCTGC

SEQ ID NO: 3157 - protein, 17 aa, Artificial Sequence
  Synthetically generated peptide
  VARIANT (1)..(17): Xaa = Any Amino Acid
CCEXLXXCCNPACXTGC

SEQ ID NO: 3158 - protein, 17 aa, Artificial Sequence
  Synthetically generated peptide
  VARIANT (1)..(17): Xaa = Any Amino Acid
CCEXLXXCCNPACTXGC

SEQ ID NO: 3159 - protein, 17 aa, Artificial Sequence
  Synthetically generated peptide
  VARIANT (1)..(17): Xaa = Any Amino Acid
CCEXLXXCCNPACTGXC

SEQ ID NO: 3160 - protein, 16 aa, Artificial Sequence
  Synthetically generated peptide
  VARIANT (1)..(16): Xaa = Any Amino Acid
CCEXLXCCXNPACTGC

SEQ ID NO: 3161 - protein, 17 aa, Artificial Sequence
  Synthetically generated peptide
  VARIANT (1)..(17): Xaa = Any Amino Acid
CCEXLXCCXXNPACTGC

SEQ ID NO: 3162 - protein, 17 aa, Artificial Sequence
  Synthetically generated peptide
  VARIANT (1)..(17): Xaa = Any Amino Acid
CCEXLXCCXNXPACTGC

SEQ ID NO: 3163 - protein, 17 aa, Artificial Sequence
  Synthetically generated peptide
  VARIANT (1)..(17): Xaa = Any Amino Acid
CCEXLXCCXNPXACTGC

SEQ ID NO: 3164 - protein, 17 aa, Artificial Sequence
  Synthetically generated peptide
  VARIANT (1)..(17): Xaa = Any Amino Acid
CCEXLXCCXNPAXCTGC

SEQ ID NO: 3165 - protein, 17 aa, Artificial Sequence
  Synthetically generated peptide
  VARIANT (1)..(17): Xaa = Any Amino Acid
CCEXLXCCXNPACXTGC

SEQ ID NO: 3166 - protein, 17 aa, Artificial Sequence
  Synthetically generated peptide
  VARIANT (1)..(17): Xaa = Any Amino Acid
CCEXLXCCXNPACTXGC

SEQ ID NO: 3167 - protein, 17 aa, Artificial Sequence
  Synthetically generated peptide
  VARIANT (1)..(17): Xaa = Any Amino Acid
CCEXLXCCXNPACTGXC

SEQ ID NO: 3168 - protein, 16 aa, Artificial Sequence
  Synthetically generated peptide
  VARIANT (1)..(16): Xaa = Any Amino Acid
CCEXLXCCNXPACTGC

SEQ ID NO: 3169 - protein, 17 aa, Artificial Sequence
  Synthetically generated peptide
  VARIANT (1)..(17): Xaa = Any Amino Acid
CCEXLXCCNXXPACTGC

SEQ ID NO: 3170 - protein, 17 aa, Artificial Sequence
  Synthetically generated peptide
  VARIANT (1)..(17): Xaa = Any Amino Acid
CCEXLXCCNXPXACTGC

SEQ ID NO: 3171 - protein, 17 aa, Artificial Sequence
  Synthetically generated peptide
  VARIANT (1)..(17): Xaa = Any Amino Acid
CCEXLXCCNXPAXCTGC

SEQ ID NO: 3172 - protein, 17 aa, Artificial Sequence
  Synthetically generated peptide
  VARIANT (1)..(17): Xaa = Any Amino Acid
CCEXLXCCNXPACXTGC

SEQ ID NO: 3173 - protein, 17 aa, Artificial Sequence
  Synthetically generated peptide
  VARIANT (1)..(17): Xaa = Any Amino Acid
CCEXLXCCNXPACTXGC

SEQ ID NO: 3174 - protein, 17 aa, Artificial Sequence
  Synthetically generated peptide
  VARIANT (1)..(17): Xaa = Any Amino Acid
CCEXLXCCNXPACTGXC

SEQ ID NO: 3175 - protein, 16 aa, Artificial Sequence
  Synthetically generated peptide
  VARIANT (1)..(16): Xaa = Any Amino Acid
CCEXLXCCNPXACTGC

SEQ ID NO: 3176 - protein, 17 aa, Artificial Sequence
  Synthetically generated peptide
  VARIANT (1)..(17): Xaa = Any Amino Acid
CCEXLXCCNPXXACTGC

SEQ ID NO: 3177 - protein, 17 aa, Artificial Sequence
  Synthetically generated peptide
  VARIANT (1)..(17): Xaa = Any Amino Acid
CCEXLXCCNPXAXCTGC

SEQ ID NO: 3178 - protein, 17 aa, Artificial Sequence
  Synthetically generated peptide
  VARIANT (1)..(17): Xaa = Any Amino Acid
CCEXLXCCNPXACXTGC

SEQ ID NO: 3179 - protein, 17 aa, Artificial Sequence
  Synthetically generated peptide
  VARIANT (1)..(17): Xaa = Any Amino Acid
CCEXLXCCNPXACTXGC

SEQ ID NO: 3180 - protein, 17 aa, Artificial Sequence
  Synthetically generated peptide
  VARIANT (1)..(17): Xaa = Any Amino Acid
CCEXLXCCNPXACTGXC

SEQ ID NO: 3181 - protein, 16 aa, Artificial Sequence
  Synthetically generated peptide
  VARIANT (1)..(16): Xaa = Any Amino Acid
CCEXLXCCNPAXCTGC

SEQ ID NO: 3182 - protein, 17 aa, Artificial Sequence
  Synthetically generated peptide
  VARIANT (1)..(17): Xaa = Any Amino Acid
CCEXLXCCNPAXXCTGC

SEQ ID NO: 3183 - protein, 17 aa, Artificial Sequence
  Synthetically generated peptide
  VARIANT (1)..(17): Xaa = Any Amino Acid
CCEXLXCCNPAXCXTGC

SEQ ID NO: 3184 - protein, 17 aa, Artificial Sequence
  Synthetically generated peptide
  VARIANT (1)..(17): Xaa = Any Amino Acid
CCEXLXCCNPAXCTXGC

SEQ ID NO: 3185 - protein, 17 aa, Artificial Sequence
  Synthetically generated peptide
  VARIANT (1)..(17): Xaa = Any Amino Acid
CCEXLXCCNPAXCTGXC

SEQ ID NO: 3186 - protein, 16 aa, Artificial Sequence
  Synthetically generated peptide
  VARIANT (1)..(16): Xaa = Any Amino Acid
CCEXLXCCNPACXTGC

SEQ ID NO: 3187 - protein, 17 aa, Artificial Sequence
  Synthetically generated peptide
  VARIANT (1)..(17): Xaa = Any Amino Acid
CCEXLXCCNPACXXTGC

SEQ ID NO: 3188 - protein, 17 aa, Artificial Sequence
  Synthetically generated peptide
  VARIANT (1)..(17): Xaa = Any Amino Acid
CCEXLXCCNPACXTXGC

SEQ ID NO: 3189 - protein, 17 aa, Artificial Sequence
  Synthetically generated peptide
  VARIANT (1)..(17): Xaa = Any Amino Acid
CCEXLXCCNPACXTGXC

SEQ ID NO: 3190 - protein, 16 aa, Artificial Sequence
  Synthetically generated peptide
  VARIANT (1)..(16): Xaa = Any Amino Acid
CCEXLXCCNPACTXGC

SEQ ID NO: 3191 - protein, 17 aa, Artificial Sequence
  Synthetically generated peptide
  VARIANT (1)..(17): Xaa = Any Amino Acid
CCEXLXCCNPACTXXGC

SEQ ID NO: 3192 - protein, 17 aa, Artificial Sequence
  Synthetically generated peptide
  VARIANT (1)..(17): Xaa = Any Amino Acid
CCEXLXCCNPACTXGXC

SEQ ID NO: 3193 - protein, 16 aa, Artificial Sequence
  Synthetically generated peptide
  VARIANT (1)..(16): Xaa = Any Amino Acid
CCEXLXCCNPACTGXC

SEQ ID NO: 3194 - protein, 17 aa, Artificial Sequence
  Synthetically generated peptide
  VARIANT (1)..(17): Xaa = Any Amino Acid
CCEXLXCCNPACTGXXC

SEQ ID NO: 3195 - protein, 15 aa, Artificial Sequence
  Synthetically generated peptide
  VARIANT (1)..(15): Xaa = Any Amino Acid
CCEXLCCXNPACTGC

SEQ ID NO: 3196 - protein, 16 aa, Artificial Sequence
  Synthetically generated peptide
  VARIANT (1)..(16): Xaa = Any Amino Acid
CCEXLCCXXNPACTGC

SEQ ID NO: 3197 - protein, 17 aa, Artificial Sequence
  Synthetically generated peptide
  VARIANT (1)..(17): Xaa = Any Amino Acid
CCEXLCCXXXNPACTGC

SEQ ID NO: 3198 - protein, 17 aa, Artificial Sequence
  Synthetically generated peptide
  VARIANT (1)..(17): Xaa = Any Amino Acid
CCEXLCCXXNXPACTGC

SEQ ID NO: 3199 - protein, 17 aa, Artificial Sequence
  Synthetically generated peptide
  VARIANT (1)..(17): Xaa = Any Amino Acid
CCEXLCCXXNPXACTGC

SEQ ID NO: 3200 - protein, 17 aa, Artificial Sequence
  Synthetically generated peptide
  VARIANT (1)..(17): Xaa = Any Amino Acid
CCEXLCCXXNPAXCTGC

SEQ ID NO: 3201 - protein, 17 aa, Artificial Sequence
  Synthetically generated peptide
  VARIANT (1)..(17): Xaa = Any Amino Acid
CCEXLCCXXNPACXTGC

SEQ ID NO: 3202 - protein, 17 aa, Artificial Sequence
  Synthetically generated peptide
  VARIANT (1)..(17): Xaa = Any Amino Acid
CCEXLCCXXNPACTXGC

SEQ ID NO: 3203 - protein, 17 aa, Artificial Sequence
  Synthetically generated peptide
  VARIANT (1)..(17): Xaa = Any Amino Acid
CCEXLCCXXNPACTGXC

SEQ ID NO: 3204 - protein, 16 aa, Artificial Sequence
  Synthetically generated peptide
  VARIANT (1)..(16): Xaa = Any Amino Acid
CCEXLCCXNXPACTGC

SEQ ID NO: 3205 - protein, 17 aa, Artificial Sequence
  Synthetically generated peptide
  VARIANT (1)..(17): Xaa = Any Amino Acid
CCEXLCCXNXXPACTGC

SEQ ID NO: 3206 - protein, 17 aa, Artificial Sequence
  Synthetically generated peptide
  VARIANT (1)..(17): Xaa = Any Amino Acid
CCEXLCCXNXPXACTGC

SEQ ID NO: 3207 - protein, 17 aa, Artificial Sequence
  Synthetically generated peptide
  VARIANT (1)..(17): Xaa = Any Amino Acid
CCEXLCCXNXPAXCTGC

SEQ ID NO: 3208 - protein, 17 aa, Artificial Sequence
  Synthetically generated peptide
  VARIANT (1)..(17): Xaa = Any Amino Acid
CCEXLCCXNXPACXTGC

SEQ ID NO: 3209 - protein, 17 aa, Artificial Sequence
  Synthetically generated peptide
  VARIANT (1)..(17): Xaa = Any Amino Acid
CCEXLCCXNXPACTXGC

SEQ ID NO: 3210 - protein, 17 aa, Artificial Sequence
  Synthetically generated peptide
  VARIANT (1)..(17): Xaa = Any Amino Acid
CCEXLCCXNXPACTGXC

SEQ ID NO: 3211 - protein, 16 aa, Artificial Sequence
  Synthetically generated peptide
  VARIANT (1)..(16): Xaa = Any Amino Acid
CCEXLCCXNPXACTGC

SEQ ID NO: 3212 - protein, 17 aa, Artificial Sequence
  Synthetically generated peptide
  VARIANT (1)..(17): Xaa = Any Amino Acid
CCEXLCCXNPXXACTGC

SEQ ID NO: 3213 - protein, 17 aa, Artificial Sequence
  Synthetically generated peptide
  VARIANT (1)..(17): Xaa = Any Amino Acid
CCEXLCCXNPXAXCTGC

SEQ ID NO: 3214 - protein, 17 aa, Artificial Sequence
  Synthetically generated peptide
  VARIANT (1)..(17): Xaa = Any Amino Acid
CCEXLCCXNPXACXTGC

SEQ ID NO: 3215 - protein, 17 aa, Artificial Sequence
  Synthetically generated peptide
  VARIANT (1)..(17): Xaa = Any Amino Acid
CCEXLCCXNPXACTXGC

SEQ ID NO: 3216 - protein, 17 aa, Artificial Sequence
  Synthetically generated peptide
  VARIANT (1)..(17): Xaa = Any Amino Acid
CCEXLCCXNPXACTGXC

SEQ ID NO: 3217 - protein, 16 aa, Artificial Sequence
  Synthetically generated peptide
  VARIANT (1)..(16): Xaa = Any Amino Acid
CCEXLCCXNPAXCTGC

SEQ ID NO: 3218 - protein, 17 aa, Artificial Sequence
  Synthetically generated peptide
  VARIANT (1)..(17): Xaa = Any Amino Acid
CCEXLCCXNPAXXCTGC

SEQ ID NO: 3219 - protein, 17 aa, Artificial Sequence
  Synthetically generated peptide
  VARIANT (1)..(17): Xaa = Any Amino Acid
CCEXLCCXNPAXCXTGC

SEQ ID NO: 3220 - protein, 17 aa, Artificial Sequence
  Synthetically generated peptide
  VARIANT (1)..(17): Xaa = Any Amino Acid
CCEXLCCXNPAXCTXGC

SEQ ID NO: 3221 - protein, 17 aa, Artificial Sequence
  Synthetically generated peptide
  VARIANT (1)..(17): Xaa = Any Amino Acid
CCEXLCCXNPAXCTGXC

SEQ ID NO: 3222 - protein, 16 aa, Artificial Sequence
  Synthetically generated peptide
  VARIANT (1)..(16): Xaa = Any Amino Acid
CCEXLCCXNPACXTGC

SEQ ID NO: 3223 - protein, 17 aa, Artificial Sequence
  Synthetically generated peptide
  VARIANT (1)..(17): Xaa = Any Amino Acid
CCEXLCCXNPACXXTGC

SEQ ID NO: 3224 - protein, 17 aa, Artificial Sequence
  Synthetically generated peptide
  VARIANT (1)..(17): Xaa = Any Amino Acid
CCEXLCCXNPACXTXGC

SEQ ID NO: 3225 - protein, 17 aa, Artificial Sequence
  Synthetically generated peptide
  VARIANT (1)..(17): Xaa = Any Amino Acid
CCEXLCCXNPACXTGXC

SEQ ID NO: 3226 - protein, 16 aa, Artificial Sequence
  Synthetically generated peptide
  VARIANT (1)..(16): Xaa = Any Amino Acid
CCEXLCCXNPACTXGC

SEQ ID NO: 3227 - protein, 17 aa, Artificial Sequence
  Synthetically generated peptide
  VARIANT (1)..(17): Xaa = Any Amino Acid
CCEXLCCXNPACTXXGC

SEQ ID NO: 3228 - protein, 17 aa, Artificial Sequence
  Synthetically generated peptide
  VARIANT (1)..(17): Xaa = Any Amino Acid
CCEXLCCXNPACTXGXC

SEQ ID NO: 3229 - protein, 16 aa, Artificial Sequence
  Synthetically generated peptide
  VARIANT (1)..(16): Xaa = Any Amino Acid
CCEXLCCXNPACTGXC

SEQ ID NO: 3230 - protein, 17 aa, Artificial Sequence
  Synthetically generated peptide
  VARIANT (1)..(17): Xaa = Any Amino Acid
CCEXLCCXNPACTGXXC

SEQ ID NO: 3231 - protein, 15 aa, Artificial Sequence
  Synthetically generated peptide
  VARIANT (1)..(15): Xaa = Any Amino Acid
CCEXLCCNXPACTGC

SEQ ID NO: 3232 - protein, 16 aa, Artificial Sequence
  Synthetically generated peptide
  VARIANT (1)..(16): Xaa = Any Amino Acid
CCEXLCCNXXPACTGC

SEQ ID NO: 3233 - protein, 17 aa, Artificial Sequence
  Synthetically generated peptide
  VARIANT (1)..(17): Xaa = Any Amino Acid
CCEXLCCNXXXPACTGC

SEQ ID NO: 3234 - protein, 17 aa, Artificial Sequence
  Synthetically generated peptide
  VARIANT (1)..(17): Xaa = Any Amino Acid
CCEXLCCNXXPXACTGC

SEQ ID NO: 3235 - protein, 17 aa, Artificial Sequence
  Synthetically generated peptide
  VARIANT (1)..(17): Xaa = Any Amino Acid
CCEXLCCNXXPAXCTGC

SEQ ID NO: 3236 - protein, 17 aa, Artificial Sequence
  Synthetically generated peptide
  VARIANT (1)..(17): Xaa = Any Amino Acid
CCEXLCCNXXPACXTGC

SEQ ID NO: 3237 - protein, 17 aa, Artificial Sequence
  Synthetically generated peptide
  VARIANT (1)..(17): Xaa = Any Amino Acid
CCEXLCCNXXPACTXGC

SEQ ID NO: 3238 - protein, 17 aa, Artificial Sequence
  Synthetically generated peptide
  VARIANT (1)..(17): Xaa = Any Amino Acid
CCEXLCCNXXPACTGXC

SEQ ID NO: 3239 - protein, 16 aa, Artificial Sequence
  Synthetically generated peptide
  VARIANT (1)..(16): Xaa = Any Amino Acid
CCEXLCCNXPXACTGC

SEQ ID NO: 3240 - protein, 17 aa, Artificial Sequence
  Synthetically generated peptide
  VARIANT (1)..(17): Xaa = Any Amino Acid
CCEXLCCNXPXXACTGC

SEQ ID NO: 3241 - protein, 17 aa, Artificial Sequence
  Synthetically generated peptide
  VARIANT (1)..(17): Xaa = Any Amino Acid
CCEXLCCNXPXAXCTGC

SEQ ID NO: 3242 - protein, 17 aa, Artificial Sequence
  Synthetically generated peptide
  VARIANT (1)..(17): Xaa = Any Amino Acid
CCEXLCCNXPXACXTGC

SEQ ID NO: 3243 - protein, 17 aa, Artificial Sequence
  Synthetically generated peptide
  VARIANT (1)..(17): Xaa = Any Amino Acid
CCEXLCCNXPXACTXGC

SEQ ID NO: 3244 - protein, 17 aa, Artificial Sequence
  Synthetically generated peptide
  VARIANT (1)..(17): Xaa = Any Amino Acid
CCEXLCCNXPXACTGXC

SEQ ID NO: 3245 - protein, 16 aa, Artificial Sequence
  Synthetically generated peptide
  VARIANT (1)..(16): Xaa = Any Amino Acid
CCEXLCCNXPAXCTGC

SEQ ID NO: 3246 - protein, 17 aa, Artificial Sequence
  Synthetically generated peptide
  VARIANT (1)..(17): Xaa = Any Amino Acid
CCEXLCCNXPAXXCTGC

SEQ ID NO: 3247 - protein, 17 aa, Artificial Sequence
  Synthetically generated peptide
  VARIANT (1)..(17): Xaa = Any Amino Acid
CCEXLCCNXPAXCXTGC

SEQ ID NO: 3248 - protein, 17 aa, Artificial Sequence
  Synthetically generated peptide
  VARIANT (1)..(17): Xaa = Any Amino Acid
CCEXLCCNXPAXCTXGC

SEQ ID NO: 3249 - protein, 17 aa, Artificial Sequence
  Synthetically generated peptide
  VARIANT (1)..(17): Xaa = Any Amino Acid
CCEXLCCNXPAXCTGXC

SEQ ID NO: 3250 - protein, 16 aa, Artificial Sequence
  Synthetically generated peptide
  VARIANT (1)..(16): Xaa = Any Amino Acid
CCEXLCCNXPACXTGC

SEQ ID NO: 3251 - protein, 17 aa, Artificial Sequence
  Synthetically generated peptide
  VARIANT (1)..(17): Xaa = Any Amino Acid
CCEXLCCNXPACXXTGC

SEQ ID NO: 3252 - protein, 17 aa, Artificial Sequence
  Synthetically generated peptide
  VARIANT (1)..(17): Xaa = Any Amino Acid
CCEXLCCNXPACXTXGC

SEQ ID NO: 3253 - protein, 17 aa, Artificial Sequence
  Synthetically generated peptide
  VARIANT (1)..(17): Xaa = Any Amino Acid
CCEXLCCNXPACXTGXC

SEQ ID NO: 3254 - protein, 16 aa, Artificial Sequence
  Synthetically generated peptide
  VARIANT (1)..(16): Xaa = Any Amino Acid
CCEXLCCNXPACTXGC

SEQ ID NO: 3255 - protein, 17 aa, Artificial Sequence
  Synthetically generated peptide
  VARIANT (1)..(17): Xaa = Any Amino Acid
CCEXLCCNXPACTXXGC

SEQ ID NO: 3256 - protein, 17 aa, Artificial Sequence
  Synthetically generated peptide
  VARIANT (1)..(17): Xaa = Any Amino Acid
CCEXLCCNXPACTXGXC

SEQ ID NO: 3257 - protein, 16 aa, Artificial Sequence
  Synthetically generated peptide
  VARIANT (1)..(16): Xaa = Any Amino Acid
CCEXLCCNXPACTGXC

SEQ ID NO: 3258 - protein, 17 aa, Artificial Sequence
  Synthetically generated peptide
  VARIANT (1)..(17): Xaa = Any Amino Acid
CCEXLCCNXPACTGXXC

SEQ ID NO: 3259 - protein, 15 aa, Artificial Sequence
  Synthetically generated peptide
  VARIANT (1)..(15): Xaa = Any Amino Acid
CCEXLCCNPXACTGC

SEQ ID NO: 3260 - protein, 16 aa, Artificial Sequence
  Synthetically generated peptide
  VARIANT (1)..(16): Xaa = Any Amino Acid
CCEXLCCNPXXACTGC

SEQ ID NO: 3261 - protein, 17 aa, Artificial Sequence
  Synthetically generated peptide
  VARIANT (1)..(17): Xaa = Any Amino Acid
CCEXLCCNPXXXACTGC

SEQ ID NO: 3262 - protein, 17 aa, Artificial Sequence
  Synthetically generated peptide
  VARIANT (1)..(17): Xaa = Any Amino Acid
CCEXLCCNPXXAXCTGC

SEQ ID NO: 3263 - protein, 17 aa, Artificial Sequence
  Synthetically generated peptide
  VARIANT (1)..(17): Xaa = Any Amino Acid
CCEXLCCNPXXACXTGC

SEQ ID NO: 3264 - protein, 17 aa, Artificial Sequence
  Synthetically generated peptide
  VARIANT (1)..(17): Xaa = Any Amino Acid
CCEXLCCNPXXACTXGC

SEQ ID NO: 3265 - protein, 17 aa, Artificial Sequence
  Synthetically generated peptide
  VARIANT (1)..(17): Xaa = Any Amino Acid
CCEXLCCNPXXACTGXC

SEQ ID NO: 3266 - protein, 16 aa, Artificial Sequence
  Synthetically generated peptide
  VARIANT (1)..(16): Xaa = Any Amino Acid
CCEXLCCNPXAXCTGC

SEQ ID NO: 3267 - protein, 17 aa, Artificial Sequence
  Synthetically generated peptide
  VARIANT (1)..(17): Xaa = Any Amino Acid
CCEXLCCNPXAXXCTGC

SEQ ID NO: 3268 - protein, 17 aa, Artificial Sequence
  Synthetically generated peptide
  VARIANT (1)..(17): Xaa = Any Amino Acid
CCEXLCCNPXAXCXTGC

SEQ ID NO: 3269 - protein, 17 aa, Artificial Sequence
  Synthetically generated peptide
  VARIANT (1)..(17): Xaa = Any Amino Acid
CCEXLCCNPXAXCTXGC

SEQ ID NO: 3270 - protein, 17 aa, Artificial Sequence
  Synthetically generated peptide
  VARIANT (1)..(17): Xaa = Any Amino Acid
CCEXLCCNPXAXCTGXC

SEQ ID NO: 3271 - protein, 16 aa, Artificial Sequence
  Synthetically generated peptide
  VARIANT (1)..(16): Xaa = Any Amino Acid
CCEXLCCNPXACXTGC

SEQ ID NO: 3272 - protein, 17 aa, Artificial Sequence
  Synthetically generated peptide
  VARIANT (1)..(17): Xaa = Any Amino Acid
CCEXLCCNPXACXXTGC

SEQ ID NO: 3273 - protein, 17 aa, Artificial Sequence
  Synthetically generated peptide
  VARIANT (1)..(17): Xaa = Any Amino Acid
CCEXLCCNPXACXTXGC

SEQ ID NO: 3274 - protein, 17 aa, Artificial Sequence
  Synthetically generated peptide
  VARIANT (1)..(17): Xaa = Any Amino Acid
CCEXLCCNPXACXTGXC

SEQ ID NO: 3275 - protein, 16 aa, Artificial Sequence
  Synthetically generated peptide
  VARIANT (1)..(16): Xaa = Any Amino Acid
CCEXLCCNPXACTXGC

SEQ ID NO: 3276 - protein, 17 aa, Artificial Sequence
  Synthetically generated peptide
  VARIANT (1)..(17): Xaa = Any Amino Acid
CCEXLCCNPXACTXXGC

SEQ ID NO: 3277 - protein, 17 aa, Artificial Sequence
  Synthetically generated peptide
  VARIANT (1)..(17): Xaa = Any Amino Acid
CCEXLCCNPXACTXGXC

SEQ ID NO: 3278 - protein, 16 aa, Artificial Sequence
  Synthetically generated peptide
  VARIANT (1)..(16): Xaa = Any Amino Acid
CCEXLCCNPXACTGXC

SEQ ID NO: 3279 - protein, 17 aa, Artificial Sequence
  Synthetically generated peptide
  VARIANT (1)..(17): Xaa = Any Amino Acid
CCEXLCCNPXACTGXXC

SEQ ID NO: 3280 - protein, 15 aa, Artificial Sequence
  Synthetically generated peptide
  VARIANT (1)..(15): Xaa = Any Amino Acid
CCEXLCCNPAXCTGC

SEQ ID NO: 3281 - protein, 16 aa, Artificial Sequence
  Synthetically generated peptide
  VARIANT (1)..(16): Xaa = Any Amino Acid
CCEXLCCNPAXXCTGC

SEQ ID NO: 3282 - protein, 17 aa, Artificial Sequence
  Synthetically generated peptide
  VARIANT (1)..(17): Xaa = Any Amino Acid
CCEXLCCNPAXXXCTGC

SEQ ID NO: 3283 - protein, 17 aa, Artificial Sequence
  Synthetically generated peptide
  VARIANT (1)..(17): Xaa = Any Amino Acid
CCEXLCCNPAXXCXTGC

SEQ ID NO: 3284 - protein, 17 aa, Artificial Sequence
  Synthetically generated peptide
  VARIANT (1)..(17): Xaa = Any Amino Acid
CCEXLCCNPAXXCTXGC

SEQ ID NO: 3285 - protein, 17 aa, Artificial Sequence
  Synthetically generated peptide
  VARIANT (1)..(17): Xaa = Any Amino Acid
CCEXLCCNPAXXCTGXC

SEQ ID NO: 3286 - protein, 16 aa, Artificial Sequence
  Synthetically generated peptide
  VARIANT (1)..(16): Xaa = Any Amino Acid
CCEXLCCNPAXCXTGC

SEQ ID NO: 3287 - protein, 17 aa, Artificial Sequence
  Synthetically generated peptide
  VARIANT (1)..(17): Xaa = Any Amino Acid
CCEXLCCNPAXCXXTGC

SEQ ID NO: 3288 - protein, 17 aa, Artificial Sequence
  Synthetically generated peptide
  VARIANT (1)..(17): Xaa = Any Amino Acid
CCEXLCCNPAXCXTXGC

SEQ ID NO: 3289 - protein, 17 aa, Artificial Sequence
  Synthetically generated peptide
  VARIANT (1)..(17): Xaa = Any Amino Acid
CCEXLCCNPAXCXTGXC

SEQ ID NO: 3290 - protein, 16 aa, Artificial Sequence
  Synthetically generated peptide
  VARIANT (1)..(16): Xaa = Any Amino Acid
CCEXLCCNPAXCTXGC

SEQ ID NO: 3291 - protein, 17 aa, Artificial Sequence
  Synthetically generated peptide
  VARIANT (1)..(17): Xaa = Any Amino Acid
CCEXLCCNPAXCTXXGC

SEQ ID NO: 3292 - protein, 17 aa, Artificial Sequence
  Synthetically generated peptide
  VARIANT (1)..(17): Xaa = Any Amino Acid
CCEXLCCNPAXCTXGXC

SEQ ID NO: 3293 - protein, 16 aa, Artificial Sequence
  Synthetically generated peptide
  VARIANT (1)..(16): Xaa = Any Amino Acid
CCEXLCCNPAXCTGXC

SEQ ID NO: 3294 - protein, 17 aa, Artificial Sequence
  Synthetically generated peptide
  VARIANT (1)..(17): Xaa = Any Amino Acid
CCEXLCCNPAXCTGXXC

SEQ ID NO: 3295 - protein, 15 aa, Artificial Sequence
  Synthetically generated peptide
  VARIANT (1)..(15): Xaa = Any Amino Acid
CCEXLCCNPACXTGC

SEQ ID NO: 3296 - protein, 16 aa, Artificial Sequence
  Synthetically generated peptide
  VARIANT (1)..(16): Xaa = Any Amino Acid
CCEXLCCNPACXXTGC

SEQ ID NO: 3297 - protein, 17 aa, Artificial Sequence
  Synthetically generated peptide
  VARIANT (1)..(17): Xaa = Any Amino Acid
CCEXLCCNPACXXXTGC

SEQ ID NO: 3298 - protein, 17 aa, Artificial Sequence
  Synthetically generated peptide
  VARIANT (1)..(17): Xaa = Any Amino Acid
CCEXLCCNPACXXTXGC

SEQ ID NO: 3299 - protein, 17 aa, Artificial Sequence
  Synthetically generated peptide
  VARIANT (1)..(17): Xaa = Any Amino Acid
CCEXLCCNPACXXTGXC

SEQ ID NO: 3300 - protein, 16 aa, Artificial Sequence
  Synthetically generated peptide
  VARIANT (1)..(16): Xaa = Any Amino Acid
CCEXLCCNPACXTXGC

SEQ ID NO: 3301 - protein, 17 aa, Artificial Sequence
  Synthetically generated peptide
  VARIANT (1)..(17): Xaa = Any Amino Acid
CCEXLCCNPACXTXXGC

SEQ ID NO: 3302 - protein, 17 aa, Artificial Sequence
  Synthetically generated peptide
  VARIANT (1)..(17): Xaa = Any Amino Acid
CCEXLCCNPACXTXGXC

SEQ ID NO: 3303 - protein, 16 aa, Artificial Sequence
  Synthetically generated peptide
  VARIANT (1)..(16): Xaa = Any Amino Acid
CCEXLCCNPACXTGXC

SEQ ID NO: 3304 - protein, 17 aa, Artificial Sequence
  Synthetically generated peptide
  VARIANT (1)..(17): Xaa = Any Amino Acid
CCEXLCCNPACXTGXXC

SEQ ID NO: 3305 - protein, 15 aa, Artificial Sequence
  Synthetically generated peptide
  VARIANT (1)..(15): Xaa = Any Amino Acid
CCEXLCCNPACTXGC

SEQ ID NO: 3306 - protein, 16 aa, Artificial Sequence
  Synthetically generated peptide
  VARIANT (1)..(16): Xaa = Any Amino Acid
CCEXLCCNPACTXXGC

SEQ ID NO: 3307 - protein, 17 aa, Artificial Sequence
  Synthetically generated peptide
  VARIANT (1)..(17): Xaa = Any Amino Acid
CCEXLCCNPACTXXXGC

SEQ ID NO: 3308 - protein, 17 aa, Artificial Sequence
  Synthetically generated peptide
  VARIANT (1)..(17): Xaa = Any Amino Acid
CCEXLCCNPACTXXGXC

SEQ ID NO: 3309 - protein, 16 aa, Artificial Sequence
  Synthetically generated peptide
  VARIANT (1)..(16): Xaa = Any Amino Acid
CCEXLCCNPACTXGXC

SEQ ID NO: 3310 - protein, 17 aa, Artificial Sequence
  Synthetically generated peptide
  VARIANT (1)..(17): Xaa = Any Amino Acid
CCEXLCCNPACTXGXXC

SEQ ID NO: 3311 - protein, 15 aa, Artificial Sequence
  Synthetically generated peptide
  VARIANT (1)..(15): Xaa = Any Amino Acid
CCEXLCCNPACTGXC

SEQ ID NO: 3312 - protein, 16 aa, Artificial Sequence
  Synthetically generated peptide
  VARIANT (1)..(16): Xaa = Any Amino Acid
CCEXLCCNPACTGXXC

SEQ ID NO: 3313 - protein, 17 aa, Artificial Sequence
  Synthetically generated peptide
  VARIANT (1)..(17): Xaa = Any Amino Acid
CCEXLCCNPACTGXXXC

SEQ ID NO: 3314 - protein, 14 aa, Artificial Sequence
  Synthetically generated peptide
  VARIANT (1)..(14): Xaa = Any Amino Acid
CCELXCCNPACTGC

SEQ ID NO: 3315 - protein, 15 aa, Artificial Sequence
  Synthetically generated peptide
  VARIANT (1)..(15): Xaa = Any Amino Acid
CCELXXCCNPACTGC

SEQ ID NO: 3316 - protein, 16 aa, Artificial Sequence
  Synthetically generated peptide
  VARIANT (1)..(16): Xaa = Any Amino Acid
CCELXXXCCNPACTGC

SEQ ID NO: 3317 - protein, 17 aa, Artificial Sequence
  Synthetically generated peptide
  VARIANT (1)..(17): Xaa = Any Amino Acid
CCELXXXXCCNPACTGC

SEQ ID NO: 3318 - protein, 17 aa, Artificial Sequence
  Synthetically generated peptide
  VARIANT (1)..(17): Xaa = Any Amino Acid
CCELXXXCCXNPACTGC

SEQ ID NO: 3319 - protein, 17 aa, Artificial Sequence
  Synthetically generated peptide
  VARIANT (1)..(17): Xaa = Any Amino Acid
CCELXXXCCNXPACTGC

SEQ ID NO: 3320 - protein, 17 aa, Artificial Sequence
  Synthetically generated peptide
  VARIANT (1)..(17): Xaa = Any Amino Acid
CCELXXXCCNPXACTGC

SEQ ID NO: 3321 - protein, 17 aa, Artificial Sequence
  Synthetically generated peptide
  VARIANT (1)..(17): Xaa = Any Amino Acid
CCELXXXCCNPAXCTGC

SEQ ID NO: 3322 - protein, 17 aa, Artificial Sequence
  Synthetically generated peptide
  VARIANT (1)..(17): Xaa = Any Amino Acid
CCELXXXCCNPACXTGC

SEQ ID NO: 3323 - protein, 17 aa, Artificial Sequence
  Synthetically generated peptide
  VARIANT (1)..(17): Xaa = Any Amino Acid
CCELXXXCCNPACTXGC

SEQ ID NO: 3324 - protein, 17 aa, Artificial Sequence
  Synthetically generated peptide
  VARIANT (1)..(17): Xaa = Any Amino Acid
CCELXXXCCNPACTGXC

SEQ ID NO: 3325 - protein, 16 aa, Artificial Sequence
  Synthetically generated peptide
  VARIANT (1)..(16): Xaa = Any Amino Acid
CCELXXCCXNPACTGC

SEQ ID NO: 3326 - protein, 17 aa, Artificial Sequence
  Synthetically generated peptide
  VARIANT (1)..(17): Xaa = Any Amino Acid
CCELXXCCXXNPACTGC

SEQ ID NO: 3327 - protein, 17 aa, Artificial Sequence
  Synthetically generated peptide
  VARIANT (1)..(17): Xaa = Any Amino Acid
CCELXXCCXNXPACTGC

SEQ ID NO: 3328 - protein, 17 aa, Artificial Sequence
  Synthetically generated peptide
  VARIANT (1)..(17): Xaa = Any Amino Acid
CCELXXCCXNPXACTGC

SEQ ID NO: 3329 - protein, 17 aa, Artificial Sequence
  Synthetically generated peptide
  VARIANT (1)..(17): Xaa = Any Amino Acid
CCELXXCCXNPAXCTGC

SEQ ID NO: 3330 - protein, 17 aa, Artificial Sequence
  Synthetically generated peptide
  VARIANT (1)..(17): Xaa = Any Amino Acid
CCELXXCCXNPACXTGC

SEQ ID NO: 3331 - protein, 17 aa, Artificial Sequence
  Synthetically generated peptide
  VARIANT (1)..(17): Xaa = Any Amino Acid
CCELXXCCXNPACTXGC

SEQ ID NO: 3332 - protein, 17 aa, Artificial Sequence
  Synthetically generated peptide
  VARIANT (1)..(17): Xaa = Any Amino Acid
CCELXXCCXNPACTGXC

SEQ ID NO: 3333 - protein, 16 aa, Artificial Sequence
  Synthetically generated peptide
  VARIANT (1)..(16): Xaa = Any Amino Acid
CCELXXCCNXPACTGC

SEQ ID NO: 3334 - protein, 17 aa, Artificial Sequence
  Synthetically generated peptide
  VARIANT (1)..(17): Xaa = Any Amino Acid
CCELXXCCNXXPACTGC

SEQ ID NO: 3335 - protein, 17 aa, Artificial Sequence
  Synthetically generated peptide
  VARIANT (1)..(17): Xaa = Any Amino Acid
CCELXXCCNXPXACTGC

SEQ ID NO: 3336 - protein, 17 aa, Artificial Sequence
  Synthetically generated peptide
  VARIANT (1)..(17): Xaa = Any Amino Acid
CCELXXCCNXPAXCTGC

SEQ ID NO: 3337 - protein, 17 aa, Artificial Sequence
  Synthetically generated peptide
  VARIANT (1)..(17): Xaa = Any Amino Acid
CCELXXCCNXPACXTGC

SEQ ID NO: 3338 - protein, 17 aa, Artificial Sequence
  Synthetically generated peptide
  VARIANT (1)..(17): Xaa = Any Amino Acid
CCELXXCCNXPACTXGC

SEQ ID NO: 3339 - protein, 17 aa, Artificial Sequence
  Synthetically generated peptide
  VARIANT (1)..(17): Xaa = Any Amino Acid
CCELXXCCNXPACTGXC

SEQ ID NO: 3340 - protein, 16 aa, Artificial Sequence
  Synthetically generated peptide
  VARIANT (1)..(16): Xaa = Any Amino Acid
CCELXXCCNPXACTGC

SEQ ID NO: 3341 - protein, 17 aa, Artificial Sequence
  Synthetically generated peptide
  VARIANT (1)..(17): Xaa = Any Amino Acid
CCELXXCCNPXXACTGC

SEQ ID NO: 3342 - protein, 17 aa, Artificial Sequence
  Synthetically generated peptide
  VARIANT (1)..(17): Xaa = Any Amino Acid
CCELXXCCNPXAXCTGC

SEQ ID NO: 3343 - protein, 17 aa, Artificial Sequence
  Synthetically generated peptide
  VARIANT (1)..(17): Xaa = Any Amino Acid
CCELXXCCNPXACXTGC

SEQ ID NO: 3344 - protein, 17 aa, Artificial Sequence
  Synthetically generated peptide
  VARIANT (1)..(17): Xaa = Any Amino Acid
CCELXXCCNPXACTXGC

SEQ ID NO: 3345 - protein, 17 aa, Artificial Sequence
  Synthetically generated peptide
  VARIANT (1)..(17): Xaa = Any Amino Acid
CCELXXCCNPXACTGXC

SEQ ID NO: 3346 - protein, 16 aa, Artificial Sequence
  Synthetically generated peptide
  VARIANT (1)..(16): Xaa = Any Amino Acid
CCELXXCCNPAXCTGC

SEQ ID NO: 3347 - protein, 17 aa, Artificial Sequence
  Synthetically generated peptide
  VARIANT (1)..(17): Xaa = Any Amino Acid
CCELXXCCNPAXXCTGC

SEQ ID NO: 3348 - protein, 17 aa, Artificial Sequence
  Synthetically generated peptide
  VARIANT (1)..(17): Xaa = Any Amino Acid
CCELXXCCNPAXCXTGC

SEQ ID NO: 3349 - protein, 17 aa, Artificial Sequence
  Synthetically generated peptide
  VARIANT (1)..(17): Xaa = Any Amino Acid
CCELXXCCNPAXCTXGC

SEQ ID NO: 3350 - protein, 17 aa, Artificial Sequence
  Synthetically generated peptide
  VARIANT (1)..(17): Xaa = Any Amino Acid
CCELXXCCNPAXCTGXC

SEQ ID NO: 3351 - protein, 16 aa, Artificial Sequence
  Synthetically generated peptide
  VARIANT (1)..(16): Xaa = Any Amino Acid
CCELXXCCNPACXTGC

SEQ ID NO: 3352 - protein, 17 aa, Artificial Sequence
  Synthetically generated peptide
  VARIANT (1)..(17): Xaa = Any Amino Acid
CCELXXCCNPACXXTGC

SEQ ID NO: 3353 - protein, 17 aa, Artificial Sequence
  Synthetically generated peptide
  VARIANT (1)..(17): Xaa = Any Amino Acid
CCELXXCCNPACXTXGC

SEQ ID NO: 3354 - protein, 17 aa, Artificial Sequence
  Synthetically generated peptide
  VARIANT (1)..(17): Xaa = Any Amino Acid
CCELXXCCNPACXTGXC

SEQ ID NO: 3355 - protein, 16 aa, Artificial Sequence
  Synthetically generated peptide
  VARIANT (1)..(16): Xaa = Any Amino Acid
CCELXXCCNPACTXGC

SEQ ID NO: 3356 - protein, 17 aa, Artificial Sequence
  Synthetically generated peptide
  VARIANT (1)..(17): Xaa = Any Amino Acid
CCELXXCCNPACTXXGC

SEQ ID NO: 3357 - protein, 17 aa, Artificial Sequence
  Synthetically generated peptide
  VARIANT (1)..(17): Xaa = Any Amino Acid
CCELXXCCNPACTXGXC

SEQ ID NO: 3358 - protein, 16 aa, Artificial Sequence
  Synthetically generated peptide
  VARIANT (1)..(16): Xaa = Any Amino Acid
CCELXXCCNPACTGXC

SEQ ID NO: 3359 - protein, 17 aa, Artificial Sequence
  Synthetically generated peptide
  VARIANT (1)..(17): Xaa = Any Amino Acid
CCELXXCCNPACTGXXC

SEQ ID NO: 3360 - protein, 15 aa, Artificial Sequence
  Synthetically generated peptide
  VARIANT (1)..(15): Xaa = Any Amino Acid
CCELXCCXNPACTGC

SEQ ID NO: 3361 - protein, 16 aa, Artificial Sequence
  Synthetically generated peptide
  VARIANT (1)..(16): Xaa = Any Amino Acid
CCELXCCXXNPACTGC

SEQ ID NO: 3362 - protein, 17 aa, Artificial Sequence
  Synthetically generated peptide
  VARIANT (1)..(17): Xaa = Any Amino Acid
CCELXCCXXXNPACTGC

SEQ ID NO: 3363 - protein, 17 aa, Artificial Sequence
  Synthetically generated peptide
  VARIANT (1)..(17): Xaa = Any Amino Acid
CCELXCCXXNXPACTGC

SEQ ID NO: 3364 - protein, 17 aa, Artificial Sequence
  Synthetically generated peptide
  VARIANT (1)..(17): Xaa = Any Amino Acid
CCELXCCXXNPXACTGC

SEQ ID NO: 3365 - protein, 17 aa, Artificial Sequence
  Synthetically generated peptide
  VARIANT (1)..(17): Xaa = Any Amino Acid
CCELXCCXXNPAXCTGC

SEQ ID NO: 3366 - protein, 17 aa, Artificial Sequence
  Synthetically generated peptide
  VARIANT (1)..(17): Xaa = Any Amino Acid
CCELXCCXXNPACXTGC

SEQ ID NO: 3367 - protein, 17 aa, Artificial Sequence
  Synthetically generated peptide
  VARIANT (1)..(17): Xaa = Any Amino Acid
CCELXCCXXNPACTXGC

SEQ ID NO: 3368 - protein, 17 aa, Artificial Sequence
  Synthetically generated peptide
  VARIANT (1)..(17): Xaa = Any Amino Acid
CCELXCCXXNPACTGXC

SEQ ID NO: 3369 - protein, 16 aa, Artificial Sequence
  Synthetically generated peptide
  VARIANT (1)..(16): Xaa = Any Amino Acid
CCELXCCXNXPACTGC

SEQ ID NO: 3370 - protein, 17 aa, Artificial Sequence
  Synthetically generated peptide
  VARIANT (1)..(17): Xaa = Any Amino Acid
CCELXCCXNXXPACTGC

SEQ ID NO: 3371 - protein, 17 aa, Artificial Sequence
  Synthetically generated peptide
  VARIANT (1)..(17): Xaa = Any Amino Acid
CCELXCCXNXPXACTGC

SEQ ID NO: 3372 - protein, 17 aa, Artificial Sequence
  Synthetically generated peptide
  VARIANT (1)..(17): Xaa = Any Amino Acid
CCELXCCXNXPAXCTGC

SEQ ID NO: 3373 - protein, 17 aa, Artificial Sequence
  Synthetically generated peptide
  VARIANT (1)..(17): Xaa = Any Amino Acid
CCELXCCXNXPACXTGC

SEQ ID NO: 3374 - protein, 17 aa, Artificial Sequence
  Synthetically generated peptide
  VARIANT (1)..(17): Xaa = Any Amino Acid
CCELXCCXNXPACTXGC

SEQ ID NO: 3375 - protein, 17 aa, Artificial Sequence
  Synthetically generated peptide
  VARIANT (1)..(17): Xaa = Any Amino Acid
CCELXCCXNXPACTGXC

SEQ ID NO: 3376 - protein, 16 aa, Artificial Sequence
  Synthetically generated peptide
  VARIANT (1)..(16): Xaa = Any Amino Acid
CCELXCCXNPXACTGC

SEQ ID NO: 3377 - protein, 17 aa, Artificial Sequence
  Synthetically generated peptide
  VARIANT (1)..(17): Xaa = Any Amino Acid
CCELXCCXNPXXACTGC

SEQ ID NO: 3378 - protein, 17 aa, Artificial Sequence
  Synthetically generated peptide
  VARIANT (1)..(17): Xaa = Any Amino Acid
CCELXCCXNPXAXCTGC

SEQ ID NO: 3379 - protein, 17 aa, Artificial Sequence
  Synthetically generated peptide
  VARIANT (1)..(17): Xaa = Any Amino Acid
CCELXCCXNPXACXTGC

SEQ ID NO: 3380 - protein, 17 aa, Artificial Sequence
  Synthetically generated peptide
  VARIANT (1)..(17): Xaa = Any Amino Acid
CCELXCCXNPXACTXGC

SEQ ID NO: 3381 - protein, 17 aa, Artificial Sequence
  Synthetically generated peptide
  VARIANT (1)..(17): Xaa = Any Amino Acid
CCELXCCXNPXACTGXC

SEQ ID NO: 3382 - protein, 16 aa, Artificial Sequence
  Synthetically generated peptide
  VARIANT (1)..(16): Xaa = Any Amino Acid
CCELXCCXNPAXCTGC

SEQ ID NO: 3383 - protein, 17 aa, Artificial Sequence
  Synthetically generated peptide
  VARIANT (1)..(17): Xaa = Any Amino Acid
CCELXCCXNPAXXCTGC

SEQ ID NO: 3384 - protein, 17 aa, Artificial Sequence
  Synthetically generated peptide
  VARIANT (1)..(17): Xaa = Any Amino Acid
CCELXCCXNPAXCXTGC

SEQ ID NO: 3385 - protein, 17 aa, Artificial Sequence
  Synthetically generated peptide
  VARIANT (1)..(17): Xaa = Any Amino Acid
CCELXCCXNPAXCTXGC

SEQ ID NO: 3386 - protein, 17 aa, Artificial Sequence
  Synthetically generated peptide
  VARIANT (1)..(17): Xaa = Any Amino Acid
CCELXCCXNPAXCTGXC

SEQ ID NO: 3387 - protein, 16 aa, Artificial Sequence
  Synthetically generated peptide
  VARIANT (1)..(16): Xaa = Any Amino Acid
CCELXCCXNPACXTGC

SEQ ID NO: 3388 - protein, 17 aa, Artificial Sequence
  Synthetically generated peptide
  VARIANT (1)..(17): Xaa = Any Amino Acid
CCELXCCXNPACXXTGC

SEQ ID NO: 3389 - protein, 17 aa, Artificial Sequence
  Synthetically generated peptide
  VARIANT (1)..(17): Xaa = Any Amino Acid
CCELXCCXNPACXTXGC

SEQ ID NO: 3390 - protein, 17 aa, Artificial Sequence
  Synthetically generated peptide
  VARIANT (1)..(17): Xaa = Any Amino Acid
CCELXCCXNPACXTGXC

SEQ ID NO: 3391 - protein, 16 aa, Artificial Sequence
  Synthetically generated peptide
  VARIANT (1)..(16): Xaa = Any Amino Acid
CCELXCCXNPACTXGC

SEQ ID NO: 3392 - protein, 17 aa, Artificial Sequence
  Synthetically generated peptide
  VARIANT (1)..(17): Xaa = Any Amino Acid
CCELXCCXNPACTXXGC

SEQ ID NO: 3393 - protein, 17 aa, Artificial Sequence
  Synthetically generated peptide
  VARIANT (1)..(17): Xaa = Any Amino Acid
CCELXCCXNPACTXGXC

SEQ ID NO: 3394 - protein, 16 aa, Artificial Sequence
  Synthetically generated peptide
  VARIANT (1)..(16): Xaa = Any Amino Acid
CCELXCCXNPACTGXC

SEQ ID NO: 3395 - protein, 17 aa, Artificial Sequence
  Synthetically generated peptide
  VARIANT (1)..(17): Xaa = Any Amino Acid
CCELXCCXNPACTGXXC

SEQ ID NO: 3396 - protein, 15 aa, Artificial Sequence
  Synthetically generated peptide
  VARIANT (1)..(15): Xaa = Any Amino Acid
CCELXCCNXPACTGC

SEQ ID NO: 3397 - protein, 16 aa, Artificial Sequence
  Synthetically generated peptide
  VARIANT (1)..(16): Xaa = Any Amino Acid
CCELXCCNXXPACTGC

SEQ ID NO: 3398 - protein, 17 aa, Artificial Sequence
  Synthetically generated peptide
  VARIANT (1)..(17): Xaa = Any Amino Acid
CCELXCCNXXXPACTGC

SEQ ID NO: 3399 - protein, 17 aa, Artificial Sequence
  Synthetically generated peptide
  VARIANT (1)..(17): Xaa = Any Amino Acid
CCELXCCNXXPXACTGC

SEQ ID NO: 3400 - protein, 17 aa, Artificial Sequence
  Synthetically generated peptide
  VARIANT (1)..(17): Xaa = Any Amino Acid
CCELXCCNXXPAXCTGC

SEQ ID NO: 3401 - protein, 17 aa, Artificial Sequence
  Synthetically generated peptide
  VARIANT (1)..(17): Xaa = Any Amino Acid
CCELXCCNXXPACXTGC

SEQ ID NO: 3402 - protein, 17 aa, Artificial Sequence
  Synthetically generated peptide
  VARIANT (1)..(17): Xaa = Any Amino Acid
CCELXCCNXXPACTXGC

SEQ ID NO: 3403 - protein, 17 aa, Artificial Sequence
  Synthetically generated peptide
  VARIANT (1)..(17): Xaa = Any Amino Acid
CCELXCCNXXPACTGXC

SEQ ID NO: 3404 - protein, 16 aa, Artificial Sequence
  Synthetically generated peptide
  VARIANT (1)..(16): Xaa = Any Amino Acid
CCELXCCNXPXACTGC

SEQ ID NO: 3405 - protein, 17 aa, Artificial Sequence
  Synthetically generated peptide
  VARIANT (1)..(17): Xaa = Any Amino Acid
CCELXCCNXPXXACTGC

SEQ ID NO: 3406 - protein, 17 aa, Artificial Sequence
  Synthetically generated peptide
  VARIANT (1)..(17): Xaa = Any Amino Acid
CCELXCCNXPXAXCTGC

SEQ ID NO: 3407 - protein, 17 aa, Artificial Sequence
  Synthetically generated peptide
  VARIANT (1)..(17): Xaa = Any Amino Acid
CCELXCCNXPXACXTGC

SEQ ID NO: 3408 - protein, 17 aa, Artificial Sequence
  Synthetically generated peptide
  VARIANT (1)..(17): Xaa = Any Amino Acid
CCELXCCNXPXACTXGC

SEQ ID NO: 3409 - protein, 17 aa, Artificial Sequence
  Synthetically generated peptide
  VARIANT (1)..(17): Xaa = Any Amino Acid
CCELXCCNXPXACTGXC

SEQ ID NO: 3410 - protein, 16 aa, Artificial Sequence
  Synthetically generated peptide
  VARIANT (1)..(16): Xaa = Any Amino Acid
CCELXCCNXPAXCTGC

SEQ ID NO: 3411 - protein, 17 aa, Artificial Sequence
  Synthetically generated peptide
  VARIANT (1)..(17): Xaa = Any Amino Acid
CCELXCCNXPAXXCTGC

SEQ ID NO: 3412 - protein, 17 aa, Artificial Sequence
  Synthetically generated peptide
  VARIANT (1)..(17): Xaa = Any Amino Acid
CCELXCCNXPAXCXTGC

SEQ ID NO: 3413 - protein, 17 aa, Artificial Sequence
  Synthetically generated peptide
  VARIANT (1)..(17): Xaa = Any Amino Acid
CCELXCCNXPAXCTXGC

SEQ ID NO: 3414 - protein, 17 aa, Artificial Sequence
  Synthetically generated peptide
  VARIANT (1)..(17): Xaa = Any Amino Acid
CCELXCCNXPAXCTGXC

SEQ ID NO: 3415 - protein, 16 aa, Artificial Sequence
  Synthetically generated peptide
  VARIANT (1)..(16): Xaa = Any Amino Acid
CCELXCCNXPACXTGC

SEQ ID NO: 3416 - protein, 17 aa, Artificial Sequence
  Synthetically generated peptide
  VARIANT (1)..(17): Xaa = Any Amino Acid
CCELXCCNXPACXXTGC

SEQ ID NO: 3417 - protein, 17 aa, Artificial Sequence
  Synthetically generated peptide
  VARIANT (1)..(17): Xaa = Any Amino Acid
CCELXCCNXPACXTXGC

SEQ ID NO: 3418 - protein, 17 aa, Artificial Sequence
  Synthetically generated peptide
  VARIANT (1)..(17): Xaa = Any Amino Acid
CCELXCCNXPACXTGXC

SEQ ID NO: 3419 - protein, 16 aa, Artificial Sequence
  Synthetically generated peptide
  VARIANT (1)..(16): Xaa = Any Amino Acid
CCELXCCNXPACTXGC

SEQ ID NO: 3420 - protein, 17 aa, Artificial Sequence
  Synthetically generated peptide
  VARIANT (1)..(17): Xaa = Any Amino Acid
CCELXCCNXPACTXXGC

SEQ ID NO: 3421 - protein, 17 aa, Artificial Sequence
  Synthetically generated peptide
  VARIANT (1)..(17): Xaa = Any Amino Acid
CCELXCCNXPACTXGXC

SEQ ID NO: 3422 - protein, 16 aa, Artificial Sequence
  Synthetically generated peptide
  VARIANT (1)..(16): Xaa = Any Amino Acid
CCELXCCNXPACTGXC

SEQ ID NO: 3423 - protein, 17 aa, Artificial Sequence
  Synthetically generated peptide
  VARIANT (1)..(17): Xaa = Any Amino Acid
CCELXCCNXPACTGXXC

SEQ ID NO: 3424 - protein, 15 aa, Artificial Sequence
  Synthetically generated peptide
  VARIANT (1)..(15): Xaa = Any Amino Acid
CCELXCCNPXACTGC

SEQ ID NO: 3425 - protein, 16 aa, Artificial Sequence
  Synthetically generated peptide
  VARIANT (1)..(16): Xaa = Any Amino Acid
CCELXCCNPXXACTGC

SEQ ID NO: 3426 - protein, 17 aa, Artificial Sequence
  Synthetically generated peptide
  VARIANT (1)..(17): Xaa = Any Amino Acid
CCELXCCNPXXXACTGC

SEQ ID NO: 3427 - protein, 17 aa, Artificial Sequence
  Synthetically generated peptide
  VARIANT (1)..(17): Xaa = Any Amino Acid
CCELXCCNPXXAXCTGC

SEQ ID NO: 3428 - protein, 17 aa, Artificial Sequence
  Synthetically generated peptide
  VARIANT (1)..(17): Xaa = Any Amino Acid
CCELXCCNPXXACXTGC

SEQ ID NO: 3429 - protein, 17 aa, Artificial Sequence
  Synthetically generated peptide
  VARIANT (1)..(17): Xaa = Any Amino Acid
CCELXCCNPXXACTXGC

SEQ ID NO: 3430 - protein, 17 aa, Artificial Sequence
  Synthetically generated peptide
  VARIANT (1)..(17): Xaa = Any Amino Acid
CCELXCCNPXXACTGXC

SEQ ID NO: 3431 - protein, 16 aa, Artificial Sequence
  Synthetically generated peptide
  VARIANT (1)..(16): Xaa = Any Amino Acid
CCELXCCNPXAXCTGC

SEQ ID NO: 3432 - protein, 17 aa, Artificial Sequence
  Synthetically generated peptide
  VARIANT (1)..(17): Xaa = Any Amino Acid
CCELXCCNPXAXXCTGC

SEQ ID NO: 3433 - protein, 17 aa, Artificial Sequence
  Synthetically generated peptide
  VARIANT (1)..(17): Xaa = Any Amino Acid
CCELXCCNPXAXCXTGC

SEQ ID NO: 3434 - protein, 17 aa, Artificial Sequence
  Synthetically generated peptide
  VARIANT (1)..(17): Xaa = Any Amino Acid
CCELXCCNPXAXCTXGC

SEQ ID NO: 3435 - protein, 17 aa, Artificial Sequence
  Synthetically generated peptide
  VARIANT (1)..(17): Xaa = Any Amino Acid
CCELXCCNPXAXCTGXC

SEQ ID NO: 3436 - protein, 16 aa, Artificial Sequence
  Synthetically generated peptide
  VARIANT (1)..(16): Xaa = Any Amino Acid
CCELXCCNPXACXTGC

SEQ ID NO: 3437 - protein, 17 aa, Artificial Sequence
  Synthetically generated peptide
  VARIANT (1)..(17): Xaa = Any Amino Acid
CCELXCCNPXACXXTGC

SEQ ID NO: 3438 - protein, 17 aa, Artificial Sequence
  Synthetically generated peptide
  VARIANT (1)..(17): Xaa = Any Amino Acid
CCELXCCNPXACXTXGC

SEQ ID NO: 3439 - protein, 17 aa, Artificial Sequence
  Synthetically generated peptide
  VARIANT (1)..(17): Xaa = Any Amino Acid
CCELXCCNPXACXTGXC

SEQ ID NO: 3440 - protein, 16 aa, Artificial Sequence
  Synthetically generated peptide
  VARIANT (1)..(16): Xaa = Any Amino Acid
CCELXCCNPXACTXGC

SEQ ID NO: 3441 - protein, 17 aa, Artificial Sequence
  Synthetically generated peptide
  VARIANT (1)..(17): Xaa = Any Amino Acid
CCELXCCNPXACTXXGC

SEQ ID NO: 3442 - protein, 17 aa, Artificial Sequence
  Synthetically generated peptide
  VARIANT (1)..(17): Xaa = Any Amino Acid
CCELXCCNPXACTXGXC

SEQ ID NO: 3443 - protein, 16 aa, Artificial Sequence
  Synthetically generated peptide
  VARIANT (1)..(16): Xaa = Any Amino Acid
CCELXCCNPXACTGXC

SEQ ID NO: 3444 - protein, 17 aa, Artificial Sequence
  Synthetically generated peptide
  VARIANT (1)..(17): Xaa = Any Amino Acid
CCELXCCNPXACTGXXC

SEQ ID NO: 3445 - protein, 15 aa, Artificial Sequence
  Synthetically generated peptide
  VARIANT (1)..(15): Xaa = Any Amino Acid
CCELXCCNPAXCTGC

SEQ ID NO: 3446 - protein, 16 aa, Artificial Sequence
  Synthetically generated peptide
  VARIANT (1)..(16): Xaa = Any Amino Acid
CCELXCCNPAXXCTGC

SEQ ID NO: 3447 - protein, 17 aa, Artificial Sequence
  Synthetically generated peptide
  VARIANT (1)..(17): Xaa = Any Amino Acid
CCELXCCNPAXXXCTGC

SEQ ID NO: 3448 - protein, 17 aa, Artificial Sequence
  Synthetically generated peptide
  VARIANT (1)..(17): Xaa = Any Amino Acid
CCELXCCNPAXXCXTGC

SEQ ID NO: 3449 - protein, 17 aa, Artificial Sequence
  Synthetically generated peptide
  VARIANT (1)..(17): Xaa = Any Amino Acid
CCELXCCNPAXXCTXGC

SEQ ID NO: 3450 - protein, 17 aa, Artificial Sequence
  Synthetically generated peptide
  VARIANT (1)..(17): Xaa = Any Amino Acid
CCELXCCNPAXXCTGXC

SEQ ID NO: 3451 - protein, 16 aa, Artificial Sequence
  Synthetically generated peptide
  VARIANT (1)..(16): Xaa = Any Amino Acid
CCELXCCNPAXCXTGC

SEQ ID NO: 3452 - protein, 17 aa, Artificial Sequence
  Synthetically generated peptide
  VARIANT (1)..(17): Xaa = Any Amino Acid
CCELXCCNPAXCXXTGC

SEQ ID NO: 3453 - protein, 17 aa, Artificial Sequence
  Synthetically generated peptide
  VARIANT (1)..(17): Xaa = Any Amino Acid
CCELXCCNPAXCXTXGC

SEQ ID NO: 3454 - protein, 17 aa, Artificial Sequence
  Synthetically generated peptide
  VARIANT (1)..(17): Xaa = Any Amino Acid
CCELXCCNPAXCXTGXC

SEQ ID NO: 3455 - protein, 16 aa, Artificial Sequence
  Synthetically generated peptide
  VARIANT (1)..(16): Xaa = Any Amino Acid
CCELXCCNPAXCTXGC

SEQ ID NO: 3456 - protein, 17 aa, Artificial Sequence
  Synthetically generated peptide
  VARIANT (1)..(17): Xaa = Any Amino Acid
CCELXCCNPAXCTXXGC

SEQ ID NO: 3457 - protein, 17 aa, Artificial Sequence
  Synthetically generated peptide
  VARIANT (1)..(17): Xaa = Any Amino Acid
CCELXCCNPAXCTXGXC

SEQ ID NO: 3458 - protein, 16 aa, Artificial Sequence
  Synthetically generated peptide
  VARIANT (1)..(16): Xaa = Any Amino Acid
CCELXCCNPAXCTGXC

SEQ ID NO: 3459 - protein, 17 aa, Artificial Sequence
  Synthetically generated peptide
  VARIANT (1)..(17): Xaa = Any Amino Acid
CCELXCCNPAXCTGXXC

SEQ ID NO: 3460 - protein, 15 aa, Artificial Sequence
  Synthetically generated peptide
  VARIANT (1)..(15): Xaa = Any Amino Acid
CCELXCCNPACXTGC

SEQ ID NO: 3461 - protein, 16 aa, Artificial Sequence
  Synthetically generated peptide
  VARIANT (1)..(16): Xaa = Any Amino Acid
CCELXCCNPACXXTGC

SEQ ID NO: 3462 - protein, 17 aa, Artificial Sequence
  Synthetically generated peptide
  VARIANT (1)..(17): Xaa = Any Amino Acid
CCELXCCNPACXXXTGC

SEQ ID NO: 3463 - protein, 17 aa, Artificial Sequence
  Synthetically generated peptide
  VARIANT (1)..(17): Xaa = Any Amino Acid
CCELXCCNPACXXTXGC

SEQ ID NO: 3464 - protein, 17 aa, Artificial Sequence
  Synthetically generated peptide
  VARIANT (1)..(17): Xaa = Any Amino Acid
CCELXCCNPACXXTGXC

SEQ ID NO: 3465 - protein, 16 aa, Artificial Sequence
  Synthetically generated peptide
  VARIANT (1)..(16): Xaa = Any Amino Acid
CCELXCCNPACXTXGC

SEQ ID NO: 3466 - protein, 17 aa, Artificial Sequence
  Synthetically generated peptide
  VARIANT (1)..(17): Xaa = Any Amino Acid
CCELXCCNPACXTXXGC

SEQ ID NO: 3467 - protein, 17 aa, Artificial Sequence
  Synthetically generated peptide
  VARIANT (1)..(17): Xaa = Any Amino Acid
CCELXCCNPACXTXGXC

SEQ ID NO: 3468 - protein, 16 aa, Artificial Sequence
  Synthetically generated peptide
  VARIANT (1)..(16): Xaa = Any Amino Acid
CCELXCCNPACXTGXC

SEQ ID NO: 3469 - protein, 17 aa, Artificial Sequence
  Synthetically generated peptide
  VARIANT (1)..(17): Xaa = Any Amino Acid
CCELXCCNPACXTGXXC

SEQ ID NO: 3470 - protein, 15 aa, Artificial Sequence
  Synthetically generated peptide
  VARIANT (1)..(15): Xaa = Any Amino Acid
CCELXCCNPACTXGC

SEQ ID NO: 3471 - protein, 16 aa, Artificial Sequence
  Synthetically generated peptide
  VARIANT (1)..(16): Xaa = Any Amino Acid
CCELXCCNPACTXXGC

SEQ ID NO: 3472 - protein, 17 aa, Artificial Sequence
  Synthetically generated peptide
  VARIANT (1)..(17): Xaa = Any Amino Acid
CCELXCCNPACTXXXGC

SEQ ID NO: 3473 - protein, 17 aa, Artificial Sequence
  Synthetically generated peptide
  VARIANT (1)..(17): Xaa = Any Amino Acid
CCELXCCNPACTXXGXC

SEQ ID NO: 3474 - protein, 16 aa, Artificial Sequence
  Synthetically generated peptide
  VARIANT (1)..(16): Xaa = Any Amino Acid
CCELXCCNPACTXGXC

SEQ ID NO: 3475 - protein, 17 aa, Artificial Sequence
  Synthetically generated peptide
  VARIANT (1)..(17): Xaa = Any Amino Acid
CCELXCCNPACTXGXXC

SEQ ID NO: 3476 - protein, 15 aa, Artificial Sequence
  Synthetically generated peptide
  VARIANT (1)..(15): Xaa = Any Amino Acid
CCELXCCNPACTGXC

SEQ ID NO: 3477 - protein, 16 aa, Artificial Sequence
  Synthetically generated peptide
  VARIANT (1)..(16): Xaa = Any Amino Acid
CCELXCCNPACTGXXC

SEQ ID NO: 3478 - protein, 17 aa, Artificial Sequence
  Synthetically generated peptide
  VARIANT (1)..(17): Xaa = Any Amino Acid
CCELXCCNPACTGXXXC

SEQ ID NO: 3479 - protein, 14 aa, Artificial Sequence
  Synthetically generated peptide
  VARIANT (1)..(14): Xaa = Any Amino Acid
CCELCCXNPACTGC

SEQ ID NO: 3480 - protein, 15 aa, Artificial Sequence
  Synthetically generated peptide
  VARIANT (1)..(15): Xaa = Any Amino Acid
CCELCCXXNPACTGC

SEQ ID NO: 3481 - protein, 16 aa, Artificial Sequence
  Synthetically generated peptide
  VARIANT (1)..(16): Xaa = Any Amino Acid
CCELCCXXXNPACTGC

SEQ ID NO: 3482 - protein, 17 aa, Artificial Sequence
  Synthetically generated peptide
  VARIANT (1)..(17): Xaa = Any Amino Acid
CCELCCXXXXNPACTGC

SEQ ID NO: 3483 - protein, 17 aa, Artificial Sequence
  Synthetically generated peptide
  VARIANT (1)..(17): Xaa = Any Amino Acid
CCELCCXXXNXPACTGC

SEQ ID NO: 3484 - protein, 17 aa, Artificial Sequence
  Synthetically generated peptide
  VARIANT (1)..(17): Xaa = Any Amino Acid
CCELCCXXXNPXACTGC

SEQ ID NO: 3485 - protein, 17 aa, Artificial Sequence
  Synthetically generated peptide
  VARIANT (1)..(17): Xaa = Any Amino Acid
CCELCCXXXNPAXCTGC

SEQ ID NO: 3486 - protein, 17 aa, Artificial Sequence
  Synthetically generated peptide
  VARIANT (1)..(17): Xaa = Any Amino Acid
CCELCCXXXNPACXTGC

SEQ ID NO: 3487 - protein, 17 aa, Artificial Sequence
  Synthetically generated peptide
  VARIANT (1)..(17): Xaa = Any Amino Acid
CCELCCXXXNPACTXGC

SEQ ID NO: 3488 - protein, 17 aa, Artificial Sequence
  Synthetically generated peptide
  VARIANT (1)..(17): Xaa = Any Amino Acid
CCELCCXXXNPACTGXC

SEQ ID NO: 3489 - protein, 16 aa, Artificial Sequence
  Synthetically generated peptide
  VARIANT (1)..(16): Xaa = Any Amino Acid
CCELCCXXNXPACTGC

SEQ ID NO: 3490 - protein, 17 aa, Artificial Sequence
  Synthetically generated peptide
  VARIANT (1)..(17): Xaa = Any Amino Acid
CCELCCXXNXXPACTGC

SEQ ID NO: 3491 - protein, 17 aa, Artificial Sequence
  Synthetically generated peptide
  VARIANT (1)..(17): Xaa = Any Amino Acid
CCELCCXXNXPXACTGC

SEQ ID NO: 3492 - protein, 17 aa, Artificial Sequence
  Synthetically generated peptide
  VARIANT (1)..(17): Xaa = Any Amino Acid
CCELCCXXNXPAXCTGC

SEQ ID NO: 3493 - protein, 17 aa, Artificial Sequence
  Synthetically generated peptide
  VARIANT (1)..(17): Xaa = Any Amino Acid
CCELCCXXNXPACXTGC

SEQ ID NO: 3494 - protein, 17 aa, Artificial Sequence
  Synthetically generated peptide
  VARIANT (1)..(17): Xaa = Any Amino Acid
CCELCCXXNXPACTXGC

SEQ ID NO: 3495 - protein, 17 aa, Artificial Sequence
  Synthetically generated peptide
  VARIANT (1)..(17): Xaa = Any Amino Acid
CCELCCXXNXPACTGXC

SEQ ID NO: 3496 - protein, 16 aa, Artificial Sequence
  Synthetically generated peptide
  VARIANT (1)..(16): Xaa = Any Amino Acid
CCELCCXXNPXACTGC

SEQ ID NO: 3497 - protein, 17 aa, Artificial Sequence
  Synthetically generated peptide
  VARIANT (1)..(17): Xaa = Any Amino Acid
CCELCCXXNPXXACTGC

SEQ ID NO: 3498 - protein, 17 aa, Artificial Sequence
  Synthetically generated peptide
  VARIANT (1)..(17): Xaa = Any Amino Acid
CCELCCXXNPXAXCTGC

SEQ ID NO: 3499 - protein, 17 aa, Artificial Sequence
  Synthetically generated peptide
  VARIANT (1)..(17): Xaa = Any Amino Acid
CCELCCXXNPXACXTGC

SEQ ID NO: 3500 - protein, 17 aa, Artificial Sequence
  Synthetically generated peptide
  VARIANT (1)..(17): Xaa = Any Amino Acid
CCELCCXXNPXACTXGC

SEQ ID NO: 3501 - protein, 17 aa, Artificial Sequence
  Synthetically generated peptide
  VARIANT (1)..(17): Xaa = Any Amino Acid
CCELCCXXNPXACTGXC

SEQ ID NO: 3502 - protein, 16 aa, Artificial Sequence
  Synthetically generated peptide
  VARIANT (1)..(16): Xaa = Any Amino Acid
CCELCCXXNPAXCTGC

SEQ ID NO: 3503 - protein, 17 aa, Artificial Sequence
  Synthetically generated peptide
  VARIANT (1)..(17): Xaa = Any Amino Acid
CCELCCXXNPAXXCTGC

SEQ ID NO: 3504 - protein, 17 aa, Artificial Sequence
  Synthetically generated peptide
  VARIANT (1)..(17): Xaa = Any Amino Acid
CCELCCXXNPAXCXTGC

SEQ ID NO: 3505 - protein, 17 aa, Artificial Sequence
  Synthetically generated peptide
  VARIANT (1)..(17): Xaa = Any Amino Acid
CCELCCXXNPAXCTXGC

SEQ ID NO: 3506 - protein, 17 aa, Artificial Sequence
  Synthetically generated peptide
  VARIANT (1)..(17): Xaa = Any Amino Acid
CCELCCXXNPAXCTGXC

SEQ ID NO: 3507 - protein, 16 aa, Artificial Sequence
  Synthetically generated peptide
  VARIANT (1)..(16): Xaa = Any Amino Acid
CCELCCXXNPACXTGC

SEQ ID NO: 3508 - protein, 17 aa, Artificial Sequence
  Synthetically generated peptide
  VARIANT (1)..(17): Xaa = Any Amino Acid
CCELCCXXNPACXXTGC

SEQ ID NO: 3509 - protein, 17 aa, Artificial Sequence
  Synthetically generated peptide
  VARIANT (1)..(17): Xaa = Any Amino Acid
CCELCCXXNPACXTXGC

SEQ ID NO: 3510 - protein, 17 aa, Artificial Sequence
  Synthetically generated peptide
  VARIANT (1)..(17): Xaa = Any Amino Acid
CCELCCXXNPACXTGXC

SEQ ID NO: 3511 - protein, 16 aa, Artificial Sequence
  Synthetically generated peptide
  VARIANT (1)..(16): Xaa = Any Amino Acid
CCELCCXXNPACTXGC

SEQ ID NO: 3512 - protein, 17 aa, Artificial Sequence
  Synthetically generated peptide
  VARIANT (1)..(17): Xaa = Any Amino Acid
CCELCCXXNPACTXXGC

SEQ ID NO: 3513 - protein, 17 aa, Artificial Sequence
  Synthetically generated peptide
  VARIANT (1)..(17): Xaa = Any Amino Acid
CCELCCXXNPACTXGXC

SEQ ID NO: 3514 - protein, 16 aa, Artificial Sequence
  Synthetically generated peptide
  VARIANT (1)..(16): Xaa = Any Amino Acid
CCELCCXXNPACTGXC

SEQ ID NO: 3515 - protein, 17 aa, Artificial Sequence
  Synthetically generated peptide
  VARIANT (1)..(17): Xaa = Any Amino Acid
CCELCCXXNPACTGXXC

SEQ ID NO: 3516 - protein, 15 aa, Artificial Sequence
  Synthetically generated peptide
  VARIANT (1)..(15): Xaa = Any Amino Acid
CCELCCXNXPACTGC

SEQ ID NO: 3517 - protein, 16 aa, Artificial Sequence
  Synthetically generated peptide
  VARIANT (1)..(16): Xaa = Any Amino Acid
CCELCCXNXXPACTGC

SEQ ID NO: 3518 - protein, 17 aa, Artificial Sequence
  Synthetically generated peptide
  VARIANT (1)..(17): Xaa = Any Amino Acid
CCELCCXNXXXPACTGC

SEQ ID NO: 3519 - protein, 17 aa, Artificial Sequence
  Synthetically generated peptide
  VARIANT (1)..(17): Xaa = Any Amino Acid
CCELCCXNXXPXACTGC

SEQ ID NO: 3520 - protein, 17 aa, Artificial Sequence
  Synthetically generated peptide
  VARIANT (1)..(17): Xaa = Any Amino Acid
CCELCCXNXXPAXCTGC

SEQ ID NO: 3521 - protein, 17 aa, Artificial Sequence
  Synthetically generated peptide
  VARIANT (1)..(17): Xaa = Any Amino Acid
CCELCCXNXXPACXTGC

SEQ ID NO: 3522 - protein, 17 aa, Artificial Sequence
  Synthetically generated peptide
  VARIANT (1)..(17): Xaa = Any Amino Acid
CCELCCXNXXPACTXGC

SEQ ID NO: 3523 - protein, 17 aa, Artificial Sequence
  Synthetically generated peptide
  VARIANT (1)..(17): Xaa = Any Amino Acid
CCELCCXNXXPACTGXC

SEQ ID NO: 3524 - protein, 16 aa, Artificial Sequence
  Synthetically generated peptide
  VARIANT (1)..(16): Xaa = Any Amino Acid
CCELCCXNXPXACTGC

SEQ ID NO: 3525 - protein, 17 aa, Artificial Sequence
  Synthetically generated peptide
  VARIANT (1)..(17): Xaa = Any Amino Acid
CCELCCXNXPXXACTGC

SEQ ID NO: 3526 - protein, 17 aa, Artificial Sequence
  Synthetically generated peptide
  VARIANT (1)..(17): Xaa = Any Amino Acid
CCELCCXNXPXAXCTGC

SEQ ID NO: 3527 - protein, 17 aa, Artificial Sequence
  Synthetically generated peptide
  VARIANT (1)..(17): Xaa = Any Amino Acid
CCELCCXNXPXACXTGC

SEQ ID NO: 3528 - protein, 17 aa, Artificial Sequence
  Synthetically generated peptide
  VARIANT (1)..(17): Xaa = Any Amino Acid
CCELCCXNXPXACTXGC

SEQ ID NO: 3529 - protein, 17 aa, Artificial Sequence
  Synthetically generated peptide
  VARIANT (1)..(17): Xaa = Any Amino Acid
CCELCCXNXPXACTGXC

SEQ ID NO: 3530 - protein, 16 aa, Artificial Sequence
  Synthetically generated peptide
  VARIANT (1)..(16): Xaa = Any Amino Acid
CCELCCXNXPAXCTGC

SEQ ID NO: 3531 - protein, 17 aa, Artificial Sequence
  Synthetically generated peptide
  VARIANT (1)..(17): Xaa = Any Amino Acid
CCELCCXNXPAXXCTGC

SEQ ID NO: 3532 - protein, 17 aa, Artificial Sequence
  Synthetically generated peptide
  VARIANT (1)..(17): Xaa = Any Amino Acid
CCELCCXNXPAXCXTGC

SEQ ID NO: 3533 - protein, 17 aa, Artificial Sequence
  Synthetically generated peptide
  VARIANT (1)..(17): Xaa = Any Amino Acid
CCELCCXNXPAXCTXGC

SEQ ID NO: 3534 - protein, 17 aa, Artificial Sequence
  Synthetically generated peptide
  VARIANT (1)..(17): Xaa = Any Amino Acid
CCELCCXNXPAXCTGXC

SEQ ID NO: 3535 - protein, 16 aa, Artificial Sequence
  Synthetically generated peptide
  VARIANT (1)..(16): Xaa = Any Amino Acid
CCELCCXNXPACXTGC

SEQ ID NO: 3536 - protein, 17 aa, Artificial Sequence
  Synthetically generated peptide
  VARIANT (1)..(17): Xaa = Any Amino Acid
CCELCCXNXPACXXTGC

SEQ ID NO: 3537 - protein, 17 aa, Artificial Sequence
  Synthetically generated peptide
  VARIANT (1)..(17): Xaa = Any Amino Acid
CCELCCXNXPACXTXGC

SEQ ID NO: 3538 - protein, 17 aa, Artificial Sequence
  Synthetically generated peptide
  VARIANT (1)..(17): Xaa = Any Amino Acid
CCELCCXNXPACXTGXC

SEQ ID NO: 3539 - protein, 16 aa, Artificial Sequence
  Synthetically generated peptide
  VARIANT (1)..(16): Xaa = Any Amino Acid
CCELCCXNXPACTXGC

SEQ ID NO: 3540 - protein, 17 aa, Artificial Sequence
  Synthetically generated peptide
  VARIANT (1)..(17): Xaa = Any Amino Acid
CCELCCXNXPACTXXGC

SEQ ID NO: 3541 - protein, 17 aa, Artificial Sequence
  Synthetically generated peptide
  VARIANT (1)..(17): Xaa = Any Amino Acid
CCELCCXNXPACTXGXC

SEQ ID NO: 3542 - protein, 16 aa, Artificial Sequence
  Synthetically generated peptide
  VARIANT (1)..(16): Xaa = Any Amino Acid
CCELCCXNXPACTGXC

SEQ ID NO: 3543 - protein, 17 aa, Artificial Sequence
  Synthetically generated peptide
  VARIANT (1)..(17): Xaa = Any Amino Acid
CCELCCXNXPACTGXXC

SEQ ID NO: 3544 - protein, 15 aa, Artificial Sequence
  Synthetically generated peptide
  VARIANT (1)..(15): Xaa = Any Amino Acid
CCELCCXNPXACTGC

SEQ ID NO: 3545 - protein, 16 aa, Artificial Sequence
  Synthetically generated peptide
  VARIANT (1)..(16): Xaa = Any Amino Acid
CCELCCXNPXXACTGC

SEQ ID NO: 3546 - protein, 17 aa, Artificial Sequence
  Synthetically generated peptide
  VARIANT (1)..(17): Xaa = Any Amino Acid
CCELCCXNPXXXACTGC

SEQ ID NO: 3547 - protein, 17 aa, Artificial Sequence
  Synthetically generated peptide
  VARIANT (1)..(17): Xaa = Any Amino Acid
CCELCCXNPXXAXCTGC

SEQ ID NO: 3548 - protein, 17 aa, Artificial Sequence
  Synthetically generated peptide
  VARIANT (1)..(17): Xaa = Any Amino Acid
CCELCCXNPXXACXTGC

SEQ ID NO: 3549 - protein, 17 aa, Artificial Sequence
  Synthetically generated peptide
  VARIANT (1)..(17): Xaa = Any Amino Acid
CCELCCXNPXXACTXGC

SEQ ID NO: 3550 - protein, 17 aa, Artificial Sequence
  Synthetically generated peptide
  VARIANT (1)..(17): Xaa = Any Amino Acid
CCELCCXNPXXACTGXC

SEQ ID NO: 3551 - protein, 16 aa, Artificial Sequence
  Synthetically generated peptide
  VARIANT (1)..(16): Xaa = Any Amino Acid
CCELCCXNPXAXCTGC

SEQ ID NO: 3552 - protein, 17 aa, Artificial Sequence
  Synthetically generated peptide
  VARIANT (1)..(17): Xaa = Any Amino Acid
CCELCCXNPXAXXCTGC

SEQ ID NO: 3553 - protein, 17 aa, Artificial Sequence
  Synthetically generated peptide
  VARIANT (1)..(17): Xaa = Any Amino Acid
CCELCCXNPXAXCXTGC

SEQ ID NO: 3554 - protein, 17 aa, Artificial Sequence
  Synthetically generated peptide
  VARIANT (1)..(17): Xaa = Any Amino Acid
CCELCCXNPXAXCTXGC

SEQ ID NO: 3555 - protein, 17 aa, Artificial Sequence
  Synthetically generated peptide
  VARIANT (1)..(17): Xaa = Any Amino Acid
CCELCCXNPXAXCTGXC

SEQ ID NO: 3556 - protein, 16 aa, Artificial Sequence
  Synthetically generated peptide
  VARIANT (1)..(16): Xaa = Any Amino Acid
CCELCCXNPXACXTGC

SEQ ID NO: 3557 - protein, 17 aa, Artificial Sequence
  Synthetically generated peptide
  VARIANT (1)..(17): Xaa = Any Amino Acid
CCELCCXNPXACXXTGC

SEQ ID NO: 3558 - protein, 17 aa, Artificial Sequence
  Synthetically generated peptide
  VARIANT (1)..(17): Xaa = Any Amino Acid
CCELCCXNPXACXTXGC

SEQ ID NO: 3559 - protein, 17 aa, Artificial Sequence
  Synthetically generated peptide
  VARIANT (1)..(17): Xaa = Any Amino Acid
CCELCCXNPXACXTGXC

SEQ ID NO: 3560 - protein, 16 aa, Artificial Sequence
  Synthetically generated peptide
  VARIANT (1)..(16): Xaa = Any Amino Acid
CCELCCXNPXACTXGC

SEQ ID NO: 3561 - protein, 17 aa, Artificial Sequence
  Synthetically generated peptide
  VARIANT (1)..(17): Xaa = Any Amino Acid
CCELCCXNPXACTXXGC

SEQ ID NO: 3562 - protein, 17 aa, Artificial Sequence
  Synthetically generated peptide
  VARIANT (1)..(17): Xaa = Any Amino Acid
CCELCCXNPXACTXGXC

SEQ ID NO: 3563 - protein, 16 aa, Artificial Sequence
  Synthetically generated peptide
  VARIANT (1)..(16): Xaa = Any Amino Acid
CCELCCXNPXACTGXC

SEQ ID NO: 3564 - protein, 17 aa, Artificial Sequence
  Synthetically generated peptide
  VARIANT (1)..(17): Xaa = Any Amino Acid
CCELCCXNPXACTGXXC

SEQ ID NO: 3565 - protein, 15 aa, Artificial Sequence
  Synthetically generated peptide
  VARIANT (1)..(15): Xaa = Any Amino Acid
CCELCCXNPAXCTGC

SEQ ID NO: 3566 - protein, 16 aa, Artificial Sequence
  Synthetically generated peptide
  VARIANT (1)..(16): Xaa = Any Amino Acid
CCELCCXNPAXXCTGC

SEQ ID NO: 3567 - protein, 17 aa, Artificial Sequence
  Synthetically generated peptide
  VARIANT (1)..(17): Xaa = Any Amino Acid
CCELCCXNPAXXXCTGC

SEQ ID NO: 3568 - protein, 17 aa, Artificial Sequence
  Synthetically generated peptide
  VARIANT (1)..(17): Xaa = Any Amino Acid
CCELCCXNPAXXCXTGC

SEQ ID NO: 3569 - protein, 17 aa, Artificial Sequence
  Synthetically generated peptide
  VARIANT (1)..(17): Xaa = Any Amino Acid
CCELCCXNPAXXCTXGC

SEQ ID NO: 3570 - protein, 17 aa, Artificial Sequence
  Synthetically generated peptide
  VARIANT (1)..(17): Xaa = Any Amino Acid
CCELCCXNPAXXCTGXC

SEQ ID NO: 3571 - protein, 16 aa, Artificial Sequence
  Synthetically generated peptide
  VARIANT (1)..(16): Xaa = Any Amino Acid
CCELCCXNPAXCXTGC

SEQ ID NO: 3572 - protein, 17 aa, Artificial Sequence
  Synthetically generated peptide
  VARIANT (1)..(17): Xaa = Any Amino Acid
CCELCCXNPAXCXXTGC

SEQ ID NO: 3573 - protein, 17 aa, Artificial Sequence
  Synthetically generated peptide
  VARIANT (1)..(17): Xaa = Any Amino Acid
CCELCCXNPAXCXTXGC

SEQ ID NO: 3574 - protein, 17 aa, Artificial Sequence
  Synthetically generated peptide
  VARIANT (1)..(17): Xaa = Any Amino Acid
CCELCCXNPAXCXTGXC

SEQ ID NO: 3575 - protein, 16 aa, Artificial Sequence
  Synthetically generated peptide
  VARIANT (1)..(16): Xaa = Any Amino Acid
CCELCCXNPAXCTXGC

SEQ ID NO: 3576 - protein, 17 aa, Artificial Sequence
  Synthetically generated peptide
  VARIANT (1)..(17): Xaa = Any Amino Acid
CCELCCXNPAXCTXXGC

SEQ ID NO: 3577 - protein, 17 aa, Artificial Sequence
  Synthetically generated peptide
  VARIANT (1)..(17): Xaa = Any Amino Acid
CCELCCXNPAXCTXGXC

SEQ ID NO: 3578 - protein, 16 aa, Artificial Sequence
  Synthetically generated peptide
  VARIANT (1)..(16): Xaa = Any Amino Acid
CCELCCXNPAXCTGXC

SEQ ID NO: 3579 - protein, 17 aa, Artificial Sequence
  Synthetically generated peptide
  VARIANT (1)..(17): Xaa = Any Amino Acid
CCELCCXNPAXCTGXXC

SEQ ID NO: 3580 - protein, 15 aa, Artificial Sequence
  Synthetically generated peptide
  VARIANT (1)..(15): Xaa = Any Amino Acid
CCELCCXNPACXTGC

SEQ ID NO: 3581 - protein, 16 aa, Artificial Sequence
  Synthetically generated peptide
  VARIANT (1)..(16): Xaa = Any Amino Acid
CCELCCXNPACXXTGC

SEQ ID NO: 3582 - protein, 17 aa, Artificial Sequence
  Synthetically generated peptide
  VARIANT (1)..(17): Xaa = Any Amino Acid
CCELCCXNPACXXXTGC

SEQ ID NO: 3583 - protein, 17 aa, Artificial Sequence
  Synthetically generated peptide
  VARIANT (1)..(17): Xaa = Any Amino Acid
CCELCCXNPACXXTXGC

SEQ ID NO: 3584 - protein, 17 aa, Artificial Sequence
  Synthetically generated peptide
  VARIANT (1)..(17): Xaa = Any Amino Acid
CCELCCXNPACXXTGXC

SEQ ID NO: 3585 - protein, 16 aa, Artificial Sequence
  Synthetically generated peptide
  VARIANT (1)..(16): Xaa = Any Amino Acid
CCELCCXNPACXTXGC

SEQ ID NO: 3586 - protein, 17 aa, Artificial Sequence
  Synthetically generated peptide
  VARIANT (1)..(17): Xaa = Any Amino Acid
CCELCCXNPACXTXXGC

SEQ ID NO: 3587 - protein, 17 aa, Artificial Sequence
  Synthetically generated peptide
  VARIANT (1)..(17): Xaa = Any Amino Acid
CCELCCXNPACXTXGXC

SEQ ID NO: 3588 - protein, 16 aa, Artificial Sequence
  Synthetically generated peptide
  VARIANT (1)..(16): Xaa = Any Amino Acid
CCELCCXNPACXTGXC

SEQ ID NO: 3589 - protein, 17 aa, Artificial Sequence
  Synthetically generated peptide
  VARIANT (1)..(17): Xaa = Any Amino Acid
CCELCCXNPACXTGXXC

SEQ ID NO: 3590 - protein, 15 aa, Artificial Sequence
  Synthetically generated peptide
  VARIANT (1)..(15): Xaa = Any Amino Acid
CCELCCXNPACTXGC

SEQ ID NO: 3591 - protein, 16 aa, Artificial Sequence
  Synthetically generated peptide
  VARIANT (1)..(16): Xaa = Any Amino Acid
CCELCCXNPACTXXGC

SEQ ID NO: 3592 - protein, 17 aa, Artificial Sequence
  Synthetically generated peptide
  VARIANT (1)..(17): Xaa = Any Amino Acid
CCELCCXNPACTXXXGC

SEQ ID NO: 3593 - protein, 17 aa, Artificial Sequence
  Synthetically generated peptide
  VARIANT (1)..(17): Xaa = Any Amino Acid
CCELCCXNPACTXXGXC

SEQ ID NO: 3594 - protein, 16 aa, Artificial Sequence
  Synthetically generated peptide
  VARIANT (1)..(16): Xaa = Any Amino Acid
CCELCCXNPACTXGXC

SEQ ID NO: 3595 - protein, 17 aa, Artificial Sequence
  Synthetically generated peptide
  VARIANT (1)..(17): Xaa = Any Amino Acid
CCELCCXNPACTXGXXC

SEQ ID NO: 3596 - protein, 15 aa, Artificial Sequence
  Synthetically generated peptide
  VARIANT (1)..(15): Xaa = Any Amino Acid
CCELCCXNPACTGXC

SEQ ID NO: 3597 - protein, 16 aa, Artificial Sequence
  Synthetically generated peptide
  VARIANT (1)..(16): Xaa = Any Amino Acid
CCELCCXNPACTGXXC

SEQ ID NO: 3598 - protein, 17 aa, Artificial Sequence
  Synthetically generated peptide
  VARIANT (1)..(17): Xaa = Any Amino Acid
CCELCCXNPACTGXXXC

SEQ ID NO: 3599 - protein, 14 aa, Artificial Sequence
  Synthetically generated peptide
  VARIANT (1)..(14): Xaa = Any Amino Acid
CCELCCNXPACTGC

SEQ ID NO: 3600 - protein, 15 aa, Artificial Sequence
  Synthetically generated peptide
  VARIANT (1)..(15): Xaa = Any Amino Acid
CCELCCNXXPACTGC

SEQ ID NO: 3601 - protein, 16 aa, Artificial Sequence
  Synthetically generated peptide
  VARIANT (1)..(16): Xaa = Any Amino Acid
CCELCCNXXXPACTGC

SEQ ID NO: 3602 - protein, 17 aa, Artificial Sequence
  Synthetically generated peptide
  VARIANT (1)..(17): Xaa = Any Amino Acid
CCELCCNXXXXPACTGC

SEQ ID NO: 3603 - protein, 17 aa, Artificial Sequence
  Synthetically generated peptide
  VARIANT (1)..(17): Xaa = Any Amino Acid
CCELCCNXXXPXACTGC

SEQ ID NO: 3604 - protein, 17 aa, Artificial Sequence
  Synthetically generated peptide
  VARIANT (1)..(17): Xaa = Any Amino Acid
CCELCCNXXXPAXCTGC

SEQ ID NO: 3605 - protein, 17 aa, Artificial Sequence
  Synthetically generated peptide
  VARIANT (1)..(17): Xaa = Any Amino Acid
CCELCCNXXXPACXTGC

SEQ ID NO: 3606 - protein, 17 aa, Artificial Sequence
  Synthetically generated peptide
  VARIANT (1)..(17): Xaa = Any Amino Acid
CCELCCNXXXPACTXGC

SEQ ID NO: 3607 - protein, 17 aa, Artificial Sequence
  Synthetically generated peptide
  VARIANT (1)..(17): Xaa = Any Amino Acid
CCELCCNXXXPACTGXC

SEQ ID NO: 3608 - protein, 16 aa, Artificial Sequence
  Synthetically generated peptide
  VARIANT (1)..(16): Xaa = Any Amino Acid
CCELCCNXXPXACTGC

SEQ ID NO: 3609 - protein, 17 aa, Artificial Sequence
  Synthetically generated peptide
  VARIANT (1)..(17): Xaa = Any Amino Acid
CCELCCNXXPXXACTGC

SEQ ID NO: 3610 - protein, 17 aa, Artificial Sequence
  Synthetically generated peptide
  VARIANT (1)..(17): Xaa = Any Amino Acid
CCELCCNXXPXAXCTGC

SEQ ID NO: 3611 - protein, 17 aa, Artificial Sequence
  Synthetically generated peptide
  VARIANT (1)..(17): Xaa = Any Amino Acid
CCELCCNXXPXACXTGC

SEQ ID NO: 3612 - protein, 17 aa, Artificial Sequence
  Synthetically generated peptide
  VARIANT (1)..(17): Xaa = Any Amino Acid
CCELCCNXXPXACTXGC

SEQ ID NO: 3613 - protein, 17 aa, Artificial Sequence
  Synthetically generated peptide
  VARIANT (1)..(17): Xaa = Any Amino Acid
CCELCCNXXPXACTGXC

SEQ ID NO: 3614 - protein, 16 aa, Artificial Sequence
  Synthetically generated peptide
  VARIANT (1)..(16): Xaa = Any Amino Acid
CCELCCNXXPAXCTGC

SEQ ID NO: 3615 - protein, 17 aa, Artificial Sequence
  Synthetically generated peptide
  VARIANT (1)..(17): Xaa = Any Amino Acid
CCELCCNXXPAXXCTGC

SEQ ID NO: 3616 - protein, 17 aa, Artificial Sequence
  Synthetically generated peptide
  VARIANT (1)..(17): Xaa = Any Amino Acid
CCELCCNXXPAXCXTGC

SEQ ID NO: 3617 - protein, 17 aa, Artificial Sequence
  Synthetically generated peptide
  VARIANT (1)..(17): Xaa = Any Amino Acid
CCELCCNXXPAXCTXGC

SEQ ID NO: 3618 - protein, 17 aa, Artificial Sequence
  Synthetically generated peptide
  VARIANT (1)..(17): Xaa = Any Amino Acid
CCELCCNXXPAXCTGXC

SEQ ID NO: 3619 - protein, 16 aa, Artificial Sequence
  Synthetically generated peptide
  VARIANT (1)..(16): Xaa = Any Amino Acid
CCELCCNXXPACXTGC

SEQ ID NO: 3620 - protein, 17 aa, Artificial Sequence
  Synthetically generated peptide
  VARIANT (1)..(17): Xaa = Any Amino Acid
CCELCCNXXPACXXTGC

SEQ ID NO: 3621 - protein, 17 aa, Artificial Sequence
  Synthetically generated peptide
  VARIANT (1)..(17): Xaa = Any Amino Acid
CCELCCNXXPACXTXGC

SEQ ID NO: 3622 - protein, 17 aa, Artificial Sequence
  Synthetically generated peptide
  VARIANT (1)..(17): Xaa = Any Amino Acid
CCELCCNXXPACXTGXC

SEQ ID NO: 3623 - protein, 16 aa, Artificial Sequence
  Synthetically generated peptide
  VARIANT (1)..(16): Xaa = Any Amino Acid
CCELCCNXXPACTXGC

SEQ ID NO: 3624 - protein, 17 aa, Artificial Sequence
  Synthetically generated peptide
  VARIANT (1)..(17): Xaa = Any Amino Acid
CCELCCNXXPACTXXGC

SEQ ID NO: 3625 - protein, 17 aa, Artificial Sequence
  Synthetically generated peptide
  VARIANT (1)..(17): Xaa = Any Amino Acid
CCELCCNXXPACTXGXC

SEQ ID NO: 3626 - protein, 16 aa, Artificial Sequence
  Synthetically generated peptide
  VARIANT (1)..(16): Xaa = Any Amino Acid
CCELCCNXXPACTGXC

SEQ ID NO: 3627 - protein, 17 aa, Artificial Sequence
  Synthetically generated peptide
  VARIANT (1)..(17): Xaa = Any Amino Acid
CCELCCNXXPACTGXXC

SEQ ID NO: 3628 - protein, 15 aa, Artificial Sequence
  Synthetically generated peptide
  VARIANT (1)..(15): Xaa = Any Amino Acid
CCELCCNXPXACTGC

SEQ ID NO: 3629 - protein, 16 aa, Artificial Sequence
  Synthetically generated peptide
  VARIANT (1)..(16): Xaa = Any Amino Acid
CCELCCNXPXXACTGC

SEQ ID NO: 3630 - protein, 17 aa, Artificial Sequence
  Synthetically generated peptide
  VARIANT (1)..(17): Xaa = Any Amino Acid
CCELCCNXPXXXACTGC

SEQ ID NO: 3631 - protein, 17 aa, Artificial Sequence
  Synthetically generated peptide
  VARIANT (1)..(17): Xaa = Any Amino Acid
CCELCCNXPXXAXCTGC

SEQ ID NO: 3632 - protein, 17 aa, Artificial Sequence
  Synthetically generated peptide
  VARIANT (1)..(17): Xaa = Any Amino Acid
CCELCCNXPXXACXTGC

SEQ ID NO: 3633 - protein, 17 aa, Artificial Sequence
  Synthetically generated peptide
  VARIANT (1)..(17): Xaa = Any Amino Acid
CCELCCNXPXXACTXGC

SEQ ID NO: 3634 - protein, 17 aa, Artificial Sequence
  Synthetically generated peptide
  VARIANT (1)..(17): Xaa = Any Amino Acid
CCELCCNXPXXACTGXC

SEQ ID NO: 3635 - protein, 16 aa, Artificial Sequence
  Synthetically generated peptide
  VARIANT (1)..(16): Xaa = Any Amino Acid
CCELCCNXPXAXCTGC

SEQ ID NO: 3636 - protein, 17 aa, Artificial Sequence
  Synthetically generated peptide
  VARIANT (1)..(17): Xaa = Any Amino Acid
CCELCCNXPXAXXCTGC

SEQ ID NO: 3637 - protein, 17 aa, Artificial Sequence
  Synthetically generated peptide
  VARIANT (1)..(17): Xaa = Any Amino Acid
CCELCCNXPXAXCXTGC

SEQ ID NO: 3638 - protein, 17 aa, Artificial Sequence
  Synthetically generated peptide
  VARIANT (1)..(17): Xaa = Any Amino Acid
CCELCCNXPXAXCTXGC

SEQ ID NO: 3639 - protein, 17 aa, Artificial Sequence
  Synthetically generated peptide
  VARIANT (1)..(17): Xaa = Any Amino Acid
CCELCCNXPXAXCTGXC

SEQ ID NO: 3640 - protein, 16 aa, Artificial Sequence
  Synthetically generated peptide
  VARIANT (1)..(16): Xaa = Any Amino Acid
CCELCCNXPXACXTGC

SEQ ID NO: 3641 - protein, 17 aa, Artificial Sequence
  Synthetically generated peptide
  VARIANT (1)..(17): Xaa = Any Amino Acid
CCELCCNXPXACXXTGC

SEQ ID NO: 3642 - protein, 17 aa, Artificial Sequence
  Synthetically generated peptide
  VARIANT (1)..(17): Xaa = Any Amino Acid
CCELCCNXPXACXTXGC

SEQ ID NO: 3643 - protein, 17 aa, Artificial Sequence
  Synthetically generated peptide
  VARIANT (1)..(17): Xaa = Any Amino Acid
CCELCCNXPXACXTGXC

SEQ ID NO: 3644 - protein, 16 aa, Artificial Sequence
  Synthetically generated peptide
  VARIANT (1)..(16): Xaa = Any Amino Acid
CCELCCNXPXACTXGC

SEQ ID NO: 3645 - protein, 17 aa, Artificial Sequence
  Synthetically generated peptide
  VARIANT (1)..(17): Xaa = Any Amino Acid
CCELCCNXPXACTXXGC

SEQ ID NO: 3646 - protein, 17 aa, Artificial Sequence
  Synthetically generated peptide
  VARIANT (1)..(17): Xaa = Any Amino Acid
CCELCCNXPXACTXGXC

SEQ ID NO: 3647 - protein, 16 aa, Artificial Sequence
  Synthetically generated peptide
  VARIANT (1)..(16): Xaa = Any Amino Acid
CCELCCNXPXACTGXC

SEQ ID NO: 3648 - protein, 17 aa, Artificial Sequence
  Synthetically generated peptide
  VARIANT (1)..(17): Xaa = Any Amino Acid
CCELCCNXPXACTGXXC

SEQ ID NO: 3649 - protein, 15 aa, Artificial Sequence
  Synthetically generated peptide
  VARIANT (1)..(15): Xaa = Any Amino Acid
CCELCCNXPAXCTGC

SEQ ID NO: 3650 - protein, 16 aa, Artificial Sequence
  Synthetically generated peptide
  VARIANT (1)..(16): Xaa = Any Amino Acid
CCELCCNXPAXXCTGC

SEQ ID NO: 3651 - protein, 17 aa, Artificial Sequence
  Synthetically generated peptide
  VARIANT (1)..(17): Xaa = Any Amino Acid
CCELCCNXPAXXXCTGC

SEQ ID NO: 3652 - protein, 17 aa, Artificial Sequence
  Synthetically generated peptide
  VARIANT (1)..(17): Xaa = Any Amino Acid
CCELCCNXPAXXCXTGC

SEQ ID NO: 3653 - protein, 17 aa, Artificial Sequence
  Synthetically generated peptide
  VARIANT (1)..(17): Xaa = Any Amino Acid
CCELCCNXPAXXCTXGC

SEQ ID NO: 3654 - protein, 17 aa, Artificial Sequence
  Synthetically generated peptide
  VARIANT (1)..(17): Xaa = Any Amino Acid
CCELCCNXPAXXCTGXC

SEQ ID NO: 3655 - protein, 16 aa, Artificial Sequence
  Synthetically generated peptide
  VARIANT (1)..(16): Xaa = Any Amino Acid
CCELCCNXPAXCXTGC

SEQ ID NO: 3656 - protein, 17 aa, Artificial Sequence
  Synthetically generated peptide
  VARIANT (1)..(17): Xaa = Any Amino Acid
CCELCCNXPAXCXXTGC

SEQ ID NO: 3657 - protein, 17 aa, Artificial Sequence
  Synthetically generated peptide
  VARIANT (1)..(17): Xaa = Any Amino Acid
CCELCCNXPAXCXTXGC

SEQ ID NO: 3658 - protein, 17 aa, Artificial Sequence
  Synthetically generated peptide
  VARIANT (1)..(17): Xaa = Any Amino Acid
CCELCCNXPAXCXTGXC

SEQ ID NO: 3659 - protein, 16 aa, Artificial Sequence
  Synthetically generated peptide
  VARIANT (1)..(16): Xaa = Any Amino Acid
CCELCCNXPAXCTXGC

SEQ ID NO: 3660 - protein, 17 aa, Artificial Sequence
  Synthetically generated peptide
  VARIANT (1)..(17): Xaa = Any Amino Acid
CCELCCNXPAXCTXXGC

SEQ ID NO: 3661 - protein, 17 aa, Artificial Sequence
  Synthetically generated peptide
  VARIANT (1)..(17): Xaa = Any Amino Acid
CCELCCNXPAXCTXGXC

SEQ ID NO: 3662 - protein, 16 aa, Artificial Sequence
  Synthetically generated peptide
  VARIANT (1)..(16): Xaa = Any Amino Acid
CCELCCNXPAXCTGXC

SEQ ID NO: 3663 - protein, 17 aa, Artificial Sequence
  Synthetically generated peptide
  VARIANT (1)..(17): Xaa = Any Amino Acid
CCELCCNXPAXCTGXXC

SEQ ID NO: 3664 - protein, 15 aa, Artificial Sequence
  Synthetically generated peptide
  VARIANT (1)..(15): Xaa = Any Amino Acid
CCELCCNXPACXTGC

SEQ ID NO: 3665 - protein, 16 aa, Artificial Sequence
  Synthetically generated peptide
  VARIANT (1)..(16): Xaa = Any Amino Acid
CCELCCNXPACXXTGC

SEQ ID NO: 3666 - protein, 17 aa, Artificial Sequence
  Synthetically generated peptide
  VARIANT (1)..(17): Xaa = Any Amino Acid
CCELCCNXPACXXXTGC

SEQ ID NO: 3667 - protein, 17 aa, Artificial Sequence
  Synthetically generated peptide
  VARIANT (1)..(17): Xaa = Any Amino Acid
CCELCCNXPACXXTXGC

SEQ ID NO: 3668 - protein, 17 aa, Artificial Sequence
  Synthetically generated peptide
  VARIANT (1)..(17): Xaa = Any Amino Acid
CCELCCNXPACXXTGXC

SEQ ID NO: 3669 - protein, 16 aa, Artificial Sequence
  Synthetically generated peptide
  VARIANT (1)..(16): Xaa = Any Amino Acid
CCELCCNXPACXTXGC

SEQ ID NO: 3670 - protein, 17 aa, Artificial Sequence
  Synthetically generated peptide
  VARIANT (1)..(17): Xaa = Any Amino Acid
CCELCCNXPACXTXXGC

SEQ ID NO: 3671 - protein, 17 aa, Artificial Sequence
  Synthetically generated peptide
  VARIANT (1)..(17): Xaa = Any Amino Acid
CCELCCNXPACXTXGXC

SEQ ID NO: 3672 - protein, 16 aa, Artificial Sequence
  Synthetically generated peptide
  VARIANT (1)..(16): Xaa = Any Amino Acid
CCELCCNXPACXTGXC

SEQ ID NO: 3673 - protein, 17 aa, Artificial Sequence
  Synthetically generated peptide
  VARIANT (1)..(17): Xaa = Any Amino Acid
CCELCCNXPACXTGXXC

SEQ ID NO: 3674 - protein, 15 aa, Artificial Sequence
  Synthetically generated peptide
  VARIANT (1)..(15): Xaa = Any Amino Acid
CCELCCNXPACTXGC

SEQ ID NO: 3675 - protein, 16 aa, Artificial Sequence
  Synthetically generated peptide
  VARIANT (1)..(16): Xaa = Any Amino Acid
CCELCCNXPACTXXGC

SEQ ID NO: 3676 - protein, 17 aa, Artificial Sequence
  Synthetically generated peptide
  VARIANT (1)..(17): Xaa = Any Amino Acid
CCELCCNXPACTXXXGC

SEQ ID NO: 3677 - protein, 17 aa, Artificial Sequence
  Synthetically generated peptide
  VARIANT (1)..(17): Xaa = Any Amino Acid
CCELCCNXPACTXXGXC

SEQ ID NO: 3678 - protein, 16 aa, Artificial Sequence
  Synthetically generated peptide
  VARIANT (1)..(16): Xaa = Any Amino Acid
CCELCCNXPACTXGXC

SEQ ID NO: 3679 - protein, 17 aa, Artificial Sequence
  Synthetically generated peptide
  VARIANT (1)..(17): Xaa = Any Amino Acid
CCELCCNXPACTXGXXC

SEQ ID NO: 3680 - protein, 15 aa, Artificial Sequence
  Synthetically generated peptide
  VARIANT (1)..(15): Xaa = Any Amino Acid
CCELCCNXPACTGXC

SEQ ID NO: 3681 - protein, 16 aa, Artificial Sequence
  Synthetically generated peptide
  VARIANT (1)..(16): Xaa = Any Amino Acid
CCELCCNXPACTGXXC

SEQ ID NO: 3682 - protein, 17 aa, Artificial Sequence
  Synthetically generated peptide
  VARIANT (1)..(17): Xaa = Any Amino Acid
CCELCCNXPACTGXXXC

SEQ ID NO: 3683 - protein, 14 aa, Artificial Sequence
  Synthetically generated peptide
  VARIANT (1)..(14): Xaa = Any Amino Acid
CCELCCNPXACTGC

SEQ ID NO: 3684 - protein, 15 aa, Artificial Sequence
  Synthetically generated peptide
  VARIANT (1)..(15): Xaa = Any Amino Acid
CCELCCNPXXACTGC

SEQ ID NO: 3685 - protein, 16 aa, Artificial Sequence
  Synthetically generated peptide
  VARIANT (1)..(16): Xaa = Any Amino Acid
CCELCCNPXXXACTGC

SEQ ID NO: 3686 - protein, 17 aa, Artificial Sequence
  Synthetically generated peptide
  VARIANT (1)..(17): Xaa = Any Amino Acid
CCELCCNPXXXXACTGC

SEQ ID NO: 3687 - protein, 17 aa, Artificial Sequence
  Synthetically generated peptide
  VARIANT (1)..(17): Xaa = Any Amino Acid
CCELCCNPXXXAXCTGC

SEQ ID NO: 3688 - protein, 17 aa, Artificial Sequence
  Synthetically generated peptide
  VARIANT (1)..(17): Xaa = Any Amino Acid
CCELCCNPXXXACXTGC

SEQ ID NO: 3689 - protein, 17 aa, Artificial Sequence
  Synthetically generated peptide
  VARIANT (1)..(17): Xaa = Any Amino Acid
CCELCCNPXXXACTXGC

SEQ ID NO: 3690 - protein, 17 aa, Artificial Sequence
  Synthetically generated peptide
  VARIANT (1)..(17): Xaa = Any Amino Acid
CCELCCNPXXXACTGXC

SEQ ID NO: 3691 - protein, 16 aa, Artificial Sequence
  Synthetically generated peptide
  VARIANT (1)..(16): Xaa = Any Amino Acid
CCELCCNPXXAXCTGC

SEQ ID NO: 3692 - protein, 17 aa, Artificial Sequence
  Synthetically generated peptide
  VARIANT (1)..(17): Xaa = Any Amino Acid
CCELCCNPXXAXXCTGC

SEQ ID NO: 3693 - protein, 17 aa, Artificial Sequence
  Synthetically generated peptide
  VARIANT (1)..(17): Xaa = Any Amino Acid
CCELCCNPXXAXCXTGC

SEQ ID NO: 3694 - protein, 17 aa, Artificial Sequence
  Synthetically generated peptide
  VARIANT (1)..(17): Xaa = Any Amino Acid
CCELCCNPXXAXCTXGC

SEQ ID NO: 3695 - protein, 17 aa, Artificial Sequence
  Synthetically generated peptide
  VARIANT (1)..(17): Xaa = Any Amino Acid
CCELCCNPXXAXCTGXC

SEQ ID NO: 3696 - protein, 16 aa, Artificial Sequence
  Synthetically generated peptide
  VARIANT (1)..(16): Xaa = Any Amino Acid
CCELCCNPXXACXTGC

SEQ ID NO: 3697 - protein, 17 aa, Artificial Sequence
  Synthetically generated peptide
  VARIANT (1)..(17): Xaa = Any Amino Acid
CCELCCNPXXACXXTGC

SEQ ID NO: 3698 - protein, 17 aa, Artificial Sequence
  Synthetically generated peptide
  VARIANT (1)..(17): Xaa = Any Amino Acid
CCELCCNPXXACXTXGC

SEQ ID NO: 3699 - protein, 17 aa, Artificial Sequence
  Synthetically generated peptide
  VARIANT (1)..(17): Xaa = Any Amino Acid
CCELCCNPXXACXTGXC

SEQ ID NO: 3700 - protein, 16 aa, Artificial Sequence
  Synthetically generated peptide
  VARIANT (1)..(16): Xaa = Any Amino Acid
CCELCCNPXXACTXGC

SEQ ID NO: 3701 - protein, 17 aa, Artificial Sequence
  Synthetically generated peptide
  VARIANT (1)..(17): Xaa = Any Amino Acid
CCELCCNPXXACTXXGC

SEQ ID NO: 3702 - protein, 17 aa, Artificial Sequence
  Synthetically generated peptide
  VARIANT (1)..(17): Xaa = Any Amino Acid
CCELCCNPXXACTXGXC

SEQ ID NO: 3703 - protein, 16 aa, Artificial Sequence
  Synthetically generated peptide
  VARIANT (1)..(16): Xaa = Any Amino Acid
CCELCCNPXXACTGXC

SEQ ID NO: 3704 - protein, 17 aa, Artificial Sequence
  Synthetically generated peptide
  VARIANT (1)..(17): Xaa = Any Amino Acid
CCELCCNPXXACTGXXC

SEQ ID NO: 3705 - protein, 15 aa, Artificial Sequence
  Synthetically generated peptide
  VARIANT (1)..(15): Xaa = Any Amino Acid
CCELCCNPXAXCTGC

SEQ ID NO: 3706 - protein, 16 aa, Artificial Sequence
  Synthetically generated peptide
  VARIANT (1)..(16): Xaa = Any Amino Acid
CCELCCNPXAXXCTGC

SEQ ID NO: 3707 - protein, 17 aa, Artificial Sequence
  Synthetically generated peptide
  VARIANT (1)..(17): Xaa = Any Amino Acid
CCELCCNPXAXXXCTGC

SEQ ID NO: 3708 - protein, 17 aa, Artificial Sequence
  Synthetically generated peptide
  VARIANT (1)..(17): Xaa = Any Amino Acid
CCELCCNPXAXXCXTGC

SEQ ID NO: 3709 - protein, 17 aa, Artificial Sequence
  Synthetically generated peptide
  VARIANT (1)..(17): Xaa = Any Amino Acid
CCELCCNPXAXXCTXGC

SEQ ID NO: 3710 - protein, 17 aa, Artificial Sequence
  Synthetically generated peptide
  VARIANT (1)..(17): Xaa = Any Amino Acid
CCELCCNPXAXXCTGXC

SEQ ID NO: 3711 - protein, 16 aa, Artificial Sequence
  Synthetically generated peptide
  VARIANT (1)..(16): Xaa = Any Amino Acid
CCELCCNPXAXCXTGC

SEQ ID NO: 3712 - protein, 17 aa, Artificial Sequence
  Synthetically generated peptide
  VARIANT (1)..(17): Xaa = Any Amino Acid
CCELCCNPXAXCXXTGC

SEQ ID NO: 3713 - protein, 17 aa, Artificial Sequence
  Synthetically generated peptide
  VARIANT (1)..(17): Xaa = Any Amino Acid
CCELCCNPXAXCXTXGC

SEQ ID NO: 3714 - protein, 17 aa, Artificial Sequence
  Synthetically generated peptide
  VARIANT (1)..(17): Xaa = Any Amino Acid
CCELCCNPXAXCXTGXC

SEQ ID NO: 3715 - protein, 16 aa, Artificial Sequence
  Synthetically generated peptide
  VARIANT (1)..(16): Xaa = Any Amino Acid
CCELCCNPXAXCTXGC

SEQ ID NO: 3716 - protein, 17 aa, Artificial Sequence
  Synthetically generated peptide
  VARIANT (1)..(17): Xaa = Any Amino Acid
CCELCCNPXAXCTXXGC

SEQ ID NO: 3717 - protein, 17 aa, Artificial Sequence
  Synthetically generated peptide
  VARIANT (1)..(17): Xaa = Any Amino Acid
CCELCCNPXAXCTXGXC

SEQ ID NO: 3718 - protein, 16 aa, Artificial Sequence
  Synthetically generated peptide
  VARIANT (1)..(16): Xaa = Any Amino Acid
CCELCCNPXAXCTGXC

SEQ ID NO: 3719 - protein, 17 aa, Artificial Sequence
  Synthetically generated peptide
  VARIANT (1)..(17): Xaa = Any Amino Acid
CCELCCNPXAXCTGXXC

SEQ ID NO: 3720 - protein, 15 aa, Artificial Sequence
  Synthetically generated peptide
  VARIANT (1)..(15): Xaa = Any Amino Acid
CCELCCNPXACXTGC

SEQ ID NO: 3721 - protein, 16 aa, Artificial Sequence
  Synthetically generated peptide
  VARIANT (1)..(16): Xaa = Any Amino Acid
CCELCCNPXACXXTGC

SEQ ID NO: 3722 - protein, 17 aa, Artificial Sequence
  Synthetically generated peptide
  VARIANT (1)..(17): Xaa = Any Amino Acid
CCELCCNPXACXXXTGC

SEQ ID NO: 3723 - protein, 17 aa, Artificial Sequence
  Synthetically generated peptide
  VARIANT (1)..(17): Xaa = Any Amino Acid
CCELCCNPXACXXTXGC

SEQ ID NO: 3724 - protein, 17 aa, Artificial Sequence
  Synthetically generated peptide
  VARIANT (1)..(17): Xaa = Any Amino Acid
CCELCCNPXACXXTGXC

SEQ ID NO: 3725 - protein, 16 aa, Artificial Sequence
  Synthetically generated peptide
  VARIANT (1)..(16): Xaa = Any Amino Acid
CCELCCNPXACXTXGC

SEQ ID NO: 3726 - protein, 17 aa, Artificial Sequence
  Synthetically generated peptide
  VARIANT (1)..(17): Xaa = Any Amino Acid
CCELCCNPXACXTXXGC

SEQ ID NO: 3727 - protein, 17 aa, Artificial Sequence
  Synthetically generated peptide
  VARIANT (1)..(17): Xaa = Any Amino Acid
CCELCCNPXACXTXGXC

SEQ ID NO: 3728 - protein, 16 aa, Artificial Sequence
  Synthetically generated peptide
  VARIANT (1)..(16): Xaa = Any Amino Acid
CCELCCNPXACXTGXC

SEQ ID NO: 3729 - protein, 17 aa, Artificial Sequence
  Synthetically generated peptide
  VARIANT (1)..(17): Xaa = Any Amino Acid
CCELCCNPXACXTGXXC

SEQ ID NO: 3730 - protein, 15 aa, Artificial Sequence
  Synthetically generated peptide
  VARIANT (1)..(15): Xaa = Any Amino Acid
CCELCCNPXACTXGC

SEQ ID NO: 3731 - protein, 16 aa, Artificial Sequence
  Synthetically generated peptide
  VARIANT (1)..(16): Xaa = Any Amino Acid
CCELCCNPXACTXXGC

SEQ ID NO: 3732 - protein, 17 aa, Artificial Sequence
  Synthetically generated peptide
  VARIANT (1)..(17): Xaa = Any Amino Acid
CCELCCNPXACTXXXGC

SEQ ID NO: 3733 - protein, 17 aa, Artificial Sequence
  Synthetically generated peptide
  VARIANT (1)..(17): Xaa = Any Amino Acid
CCELCCNPXACTXXGXC

SEQ ID NO: 3734 - protein, 16 aa, Artificial Sequence
  Synthetically generated peptide
  VARIANT (1)..(16): Xaa = Any Amino Acid
CCELCCNPXACTXGXC

SEQ ID NO: 3735 - protein, 17 aa, Artificial Sequence
  Synthetically generated peptide
  VARIANT (1)..(17): Xaa = Any Amino Acid
CCELCCNPXACTXGXXC

SEQ ID NO: 3736 - protein, 15 aa, Artificial Sequence
  Synthetically generated peptide
  VARIANT (1)..(15): Xaa = Any Amino Acid
CCELCCNPXACTGXC

SEQ ID NO: 3737 - protein, 16 aa, Artificial Sequence
  Synthetically generated peptide
  VARIANT (1)..(16): Xaa = Any Amino Acid
CCELCCNPXACTGXXC

SEQ ID NO: 3738 - protein, 17 aa, Artificial Sequence
  Synthetically generated peptide
  VARIANT (1)..(17): Xaa = Any Amino Acid
CCELCCNPXACTGXXXC

SEQ ID NO: 3739 - protein, 14 aa, Artificial Sequence
  Synthetically generated peptide
  VARIANT (1)..(14): Xaa = Any Amino Acid
CCELCCNPAXCTGC

SEQ ID NO: 3740 - protein, 15 aa, Artificial Sequence
  Synthetically generated peptide
  VARIANT (1)..(15): Xaa = Any Amino Acid
CCELCCNPAXXCTGC

SEQ ID NO: 3741 - protein, 16 aa, Artificial Sequence
  Synthetically generated peptide
  VARIANT (1)..(16): Xaa = Any Amino Acid
CCELCCNPAXXXCTGC

SEQ ID NO: 3742 - protein, 17 aa, Artificial Sequence
  Synthetically generated peptide
  VARIANT (1)..(17): Xaa = Any Amino Acid
CCELCCNPAXXXXCTGC

SEQ ID NO: 3743 - protein, 17 aa, Artificial Sequence
  Synthetically generated peptide
  VARIANT (1)..(17): Xaa = Any Amino Acid
CCELCCNPAXXXCXTGC

SEQ ID NO: 3744 - protein, 17 aa, Artificial Sequence
  Synthetically generated peptide
  VARIANT (1)..(17): Xaa = Any Amino Acid
CCELCCNPAXXXCTXGC

SEQ ID NO: 3745 - protein, 17 aa, Artificial Sequence
  Synthetically generated peptide
  VARIANT (1)..(17): Xaa = Any Amino Acid
CCELCCNPAXXXCTGXC

SEQ ID NO: 3746 - protein, 16 aa, Artificial Sequence
  Synthetically generated peptide
  VARIANT (1)..(16): Xaa = Any Amino Acid
CCELCCNPAXXCXTGC

SEQ ID NO: 3747 - protein, 17 aa, Artificial Sequence
  Synthetically generated peptide
  VARIANT (1)..(17): Xaa = Any Amino Acid
CCELCCNPAXXCXXTGC

SEQ ID NO: 3748 - protein, 17 aa, Artificial Sequence
  Synthetically generated peptide
  VARIANT (1)..(17): Xaa = Any Amino Acid
CCELCCNPAXXCXTXGC

SEQ ID NO: 3749 - protein, 17 aa, Artificial Sequence
  Synthetically generated peptide
  VARIANT (1)..(17): Xaa = Any Amino Acid
CCELCCNPAXXCXTGXC

SEQ ID NO: 3750 - protein, 16 aa, Artificial Sequence
  Synthetically generated peptide
  VARIANT (1)..(16): Xaa = Any Amino Acid
CCELCCNPAXXCTXGC

SEQ ID NO: 3751 - protein, 17 aa, Artificial Sequence
  Synthetically generated peptide
  VARIANT (1)..(17): Xaa = Any Amino Acid
CCELCCNPAXXCTXXGC

SEQ ID NO: 3752 - protein, 17 aa, Artificial Sequence
  Synthetically generated peptide
  VARIANT (1)..(17): Xaa = Any Amino Acid
CCELCCNPAXXCTXGXC

SEQ ID NO: 3753 - protein, 16 aa, Artificial Sequence
  Synthetically generated peptide
  VARIANT (1)..(16): Xaa = Any Amino Acid
CCELCCNPAXXCTGXC

SEQ ID NO: 3754 - protein, 17 aa, Artificial Sequence
  Synthetically generated peptide
  VARIANT (1)..(17): Xaa = Any Amino Acid
CCELCCNPAXXCTGXXC

SEQ ID NO: 3755 - protein, 15 aa, Artificial Sequence
  Synthetically generated peptide
  VARIANT (1)..(15): Xaa = Any Amino Acid
CCELCCNPAXCXTGC

SEQ ID NO: 3756 - protein, 16 aa, Artificial Sequence
  Synthetically generated peptide
  VARIANT (1)..(16): Xaa = Any Amino Acid
CCELCCNPAXCXXTGC

SEQ ID NO: 3757 - protein, 17 aa, Artificial Sequence
  Synthetically generated peptide
  VARIANT (1)..(17): Xaa = Any Amino Acid
CCELCCNPAXCXXXTGC

SEQ ID NO: 3758 - protein, 17 aa, Artificial Sequence
  Synthetically generated peptide
  VARIANT (1)..(17): Xaa = Any Amino Acid
CCELCCNPAXCXXTXGC

SEQ ID NO: 3759 - protein, 17 aa, Artificial Sequence
  Synthetically generated peptide
  VARIANT (1)..(17): Xaa = Any Amino Acid
CCELCCNPAXCXXTGXC

SEQ ID NO: 3760 - protein, 16 aa, Artificial Sequence
  Synthetically generated peptide
  VARIANT (1)..(16): Xaa = Any Amino Acid
CCELCCNPAXCXTXGC

SEQ ID NO: 3761 - protein, 17 aa, Artificial Sequence
  Synthetically generated peptide
  VARIANT (1)..(17): Xaa = Any Amino Acid
CCELCCNPAXCXTXXGC

SEQ ID NO: 3762 - protein, 17 aa, Artificial Sequence
  Synthetically generated peptide
  VARIANT (1)..(17): Xaa = Any Amino Acid
CCELCCNPAXCXTXGXC

SEQ ID NO: 3763 - protein, 16 aa, Artificial Sequence
  Synthetically generated peptide
  VARIANT (1)..(16): Xaa = Any Amino Acid
CCELCCNPAXCXTGXC

SEQ ID NO: 3764 - protein, 17 aa, Artificial Sequence
  Synthetically generated peptide
  VARIANT (1)..(17): Xaa = Any Amino Acid
CCELCCNPAXCXTGXXC

SEQ ID NO: 3765 - protein, 15 aa, Artificial Sequence
  Synthetically generated peptide
  VARIANT (1)..(15): Xaa = Any Amino Acid
CCELCCNPAXCTXGC

SEQ ID NO: 3766 - protein, 16 aa, Artificial Sequence
  Synthetically generated peptide
  VARIANT (1)..(16): Xaa = Any Amino Acid
CCELCCNPAXCTXXGC

SEQ ID NO: 3767 - protein, 17 aa, Artificial Sequence
  Synthetically generated peptide
  VARIANT (1)..(17): Xaa = Any Amino Acid
CCELCCNPAXCTXXXGC

SEQ ID NO: 3768 - protein, 17 aa, Artificial Sequence
  Synthetically generated peptide
  VARIANT (1)..(17): Xaa = Any Amino Acid
CCELCCNPAXCTXXGXC

SEQ ID NO: 3769 - protein, 16 aa, Artificial Sequence
  Synthetically generated peptide
  VARIANT (1)..(16): Xaa = Any Amino Acid
CCELCCNPAXCTXGXC

SEQ ID NO: 3770 - protein, 17 aa, Artificial Sequence
  Synthetically generated peptide
  VARIANT (1)..(17): Xaa = Any Amino Acid
CCELCCNPAXCTXGXXC

SEQ ID NO: 3771 - protein, 15 aa, Artificial Sequence
  Synthetically generated peptide
  VARIANT (1)..(15): Xaa = Any Amino Acid
CCELCCNPAXCTGXC

SEQ ID NO: 3772 - protein, 16 aa, Artificial Sequence
  Synthetically generated peptide
  VARIANT (1)..(16): Xaa = Any Amino Acid
CCELCCNPAXCTGXXC

SEQ ID NO: 3773 - protein, 17 aa, Artificial Sequence
  Synthetically generated peptide
  VARIANT (1)..(17): Xaa = Any Amino Acid
CCELCCNPAXCTGXXXC

SEQ ID NO: 3774 - protein, 14 aa, Artificial Sequence
  Synthetically generated peptide
  VARIANT (1)..(14): Xaa = Any Amino Acid
CCELCCNPACXTGC

SEQ ID NO: 3775 - protein, 15 aa, Artificial Sequence
  Synthetically generated peptide
  VARIANT (1)..(15): Xaa = Any Amino Acid
CCELCCNPACXXTGC

SEQ ID NO: 3776 - protein, 16 aa, Artificial Sequence
  Synthetically generated peptide
  VARIANT (1)..(16): Xaa = Any Amino Acid
CCELCCNPACXXXTGC

SEQ ID NO: 3777 - protein, 17 aa, Artificial Sequence
  Synthetically generated peptide
  VARIANT (1)..(17): Xaa = Any Amino Acid
CCELCCNPACXXXXTGC

SEQ ID NO: 3778 - protein, 17 aa, Artificial Sequence
  Synthetically generated peptide
  VARIANT (1)..(17): Xaa = Any Amino Acid
CCELCCNPACXXXTXGC

SEQ ID NO: 3779 - protein, 17 aa, Artificial Sequence
  Synthetically generated peptide
  VARIANT (1)..(17): Xaa = Any Amino Acid
CCELCCNPACXXXTGXC

SEQ ID NO: 3780 - protein, 16 aa, Artificial Sequence
  Synthetically generated peptide
  VARIANT (1)..(16): Xaa = Any Amino Acid
CCELCCNPACXXTXGC

SEQ ID NO: 3781 - protein, 17 aa, Artificial Sequence
  Synthetically generated peptide
  VARIANT (1)..(17): Xaa = Any Amino Acid
CCELCCNPACXXTXXGC

SEQ ID NO: 3782 - protein, 17 aa, Artificial Sequence
  Synthetically generated peptide
  VARIANT (1)..(17): Xaa = Any Amino Acid
CCELCCNPACXXTXGXC

SEQ ID NO: 3783 - protein, 16 aa, Artificial Sequence
  Synthetically generated peptide
  VARIANT (1)..(16): Xaa = Any Amino Acid
CCELCCNPACXXTGXC

SEQ ID NO: 3784 - protein, 17 aa, Artificial Sequence
  Synthetically generated peptide
  VARIANT (1)..(17): Xaa = Any Amino Acid
CCELCCNPACXXTGXXC

SEQ ID NO: 3785 - protein, 15 aa, Artificial Sequence
  Synthetically generated peptide
  VARIANT (1)..(15): Xaa = Any Amino Acid
CCELCCNPACXTXGC

SEQ ID NO: 3786 - protein, 16 aa, Artificial Sequence
  Synthetically generated peptide
  VARIANT (1)..(16): Xaa = Any Amino Acid
CCELCCNPACXTXXGC

SEQ ID NO: 3787 - protein, 17 aa, Artificial Sequence
  Synthetically generated peptide
  VARIANT (1)..(17): Xaa = Any Amino Acid
CCELCCNPACXTXXXGC

SEQ ID NO: 3788 - protein, 17 aa, Artificial Sequence
  Synthetically generated peptide
  VARIANT (1)..(17): Xaa = Any Amino Acid
CCELCCNPACXTXXGXC

SEQ ID NO: 3789 - protein, 16 aa, Artificial Sequence
  Synthetically generated peptide
  VARIANT (1)..(16): Xaa = Any Amino Acid
CCELCCNPACXTXGXC

SEQ ID NO: 3790 - protein, 17 aa, Artificial Sequence
  Synthetically generated peptide
  VARIANT (1)..(17): Xaa = Any Amino Acid
CCELCCNPACXTXGXXC

SEQ ID NO: 3791 - protein, 15 aa, Artificial Sequence
  Synthetically generated peptide
  VARIANT (1)..(15): Xaa = Any Amino Acid
CCELCCNPACXTGXC

SEQ ID NO: 3792 - protein, 16 aa, Artificial Sequence
  Synthetically generated peptide
  VARIANT (1)..(16): Xaa = Any Amino Acid
CCELCCNPACXTGXXC

SEQ ID NO: 3793 - protein, 17 aa, Artificial Sequence
  Synthetically generated peptide
  VARIANT (1)..(17): Xaa = Any Amino Acid
CCELCCNPACXTGXXXC

SEQ ID NO: 3794 - protein, 14 aa, Artificial Sequence
  Synthetically generated peptide
  VARIANT (1)..(14): Xaa = Any Amino Acid
CCELCCNPACTXGC

SEQ ID NO: 3795 - protein, 15 aa, Artificial Sequence
  Synthetically generated peptide
  VARIANT (1)..(15): Xaa = Any Amino Acid
CCELCCNPACTXXGC

SEQ ID NO: 3796 - protein, 16 aa, Artificial Sequence
  Synthetically generated peptide
  VARIANT (1)..(16): Xaa = Any Amino Acid
CCELCCNPACTXXXGC

SEQ ID NO: 3797 - protein, 17 aa, Artificial Sequence
  Synthetically generated peptide
  VARIANT (1)..(17): Xaa = Any Amino Acid
CCELCCNPACTXXXXGC

SEQ ID NO: 3798 - protein, 17 aa, Artificial Sequence
  Synthetically generated peptide
  VARIANT (1)..(17): Xaa = Any Amino Acid
CCELCCNPACTXXXGXC

SEQ ID NO: 3799 - protein, 16 aa, Artificial Sequence
  Synthetically generated peptide
  VARIANT (1)..(16): Xaa = Any Amino Acid
CCELCCNPACTXXGXC

SEQ ID NO: 3800 - protein, 17 aa, Artificial Sequence
  Synthetically generated peptide
  VARIANT (1)..(17): Xaa = Any Amino Acid
CCELCCNPACTXXGXXC

SEQ ID NO: 3801 - protein, 15 aa, Artificial Sequence
  Synthetically generated peptide
  VARIANT (1)..(15): Xaa = Any Amino Acid
CCELCCNPACTXGXC

SEQ ID NO: 3802 - protein, 16 aa, Artificial Sequence
  Synthetically generated peptide
  VARIANT (1)..(16): Xaa = Any Amino Acid
CCELCCNPACTXGXXC

SEQ ID NO: 3803 - protein, 17 aa, Artificial Sequence
  Synthetically generated peptide
  VARIANT (1)..(17): Xaa = Any Amino Acid
CCELCCNPACTXGXXXC

SEQ ID NO: 3804 - protein, 14 aa, Artificial Sequence
  Synthetically generated peptide
  VARIANT (1)..(14): Xaa = Any Amino Acid
CCELCCNPACTGXC

SEQ ID NO: 3805 - protein, 15 aa, Artificial Sequence
  Synthetically generated peptide
  VARIANT (1)..(15): Xaa = Any Amino Acid
CCELCCNPACTGXXC

SEQ ID NO: 3806 - protein, 16 aa, Artificial Sequence
  Synthetically generated peptide
  VARIANT (1)..(16): Xaa = Any Amino Acid
CCELCCNPACTGXXXC

SEQ ID NO: 3807 - protein, 17 aa, Artificial Sequence
  Synthetically generated peptide
  VARIANT (1)..(17): Xaa = Any Amino Acid
CCELCCNPACTGXXXXC

SEQ ID NO: 3808 - protein, 14 aa, Artificial Sequence
  Synthetically generated peptide
  VARIANT (1)..(14): Xaa = Any Amino Acid
CCXEWCCNPACTGC

SEQ ID NO: 3809 - protein, 15 aa, Artificial Sequence
  Synthetically generated peptide
  VARIANT (1)..(15): Xaa = Any Amino Acid
CCXXEWCCNPACTGC

SEQ ID NO: 3810 - protein, 16 aa, Artificial Sequence
  Synthetically generated peptide
  VARIANT (1)..(16): Xaa = Any Amino Acid
CCXXXEWCCNPACTGC

SEQ ID NO: 3811 - protein, 17 aa, Artificial Sequence
  Synthetically generated peptide
  VARIANT (1)..(17): Xaa = Any Amino Acid
CCXXXXEWCCNPACTGC

SEQ ID NO: 3812 - protein, 17 aa, Artificial Sequence
  Synthetically generated peptide
  VARIANT (1)..(17): Xaa = Any Amino Acid
CCXXXEXWCCNPACTGC

SEQ ID NO: 3813 - protein, 17 aa, Artificial Sequence
  Synthetically generated peptide
  VARIANT (1)..(17): Xaa = Any Amino Acid
CCXXXEWXCCNPACTGC

SEQ ID NO: 3814 - protein, 17 aa, Artificial Sequence
  Synthetically generated peptide
  VARIANT (1)..(17): Xaa = Any Amino Acid
CCXXXEWCCXNPACTGC

SEQ ID NO: 3815 - protein, 17 aa, Artificial Sequence
  Synthetically generated peptide
  VARIANT (1)..(17): Xaa = Any Amino Acid
CCXXXEWCCNXPACTGC

SEQ ID NO: 3816 - protein, 17 aa, Artificial Sequence
  Synthetically generated peptide
  VARIANT (1)..(17): Xaa = Any Amino Acid
CCXXXEWCCNPXACTGC

SEQ ID NO: 3817 - protein, 17 aa, Artificial Sequence
  Synthetically generated peptide
  VARIANT (1)..(17): Xaa = Any Amino Acid
CCXXXEWCCNPAXCTGC

SEQ ID NO: 3818 - protein, 17 aa, Artificial Sequence
  Synthetically generated peptide
  VARIANT (1)..(17): Xaa = Any Amino Acid
CCXXXEWCCNPACXTGC

SEQ ID NO: 3819 - protein, 17 aa, Artificial Sequence
  Synthetically generated peptide
  VARIANT (1)..(17): Xaa = Any Amino Acid
CCXXXEWCCNPACTXGC

SEQ ID NO: 3820 - protein, 17 aa, Artificial Sequence
  Synthetically generated peptide
  VARIANT (1)..(17): Xaa = Any Amino Acid
CCXXXEWCCNPACTGXC

SEQ ID NO: 3821 - protein, 16 aa, Artificial Sequence
  Synthetically generated peptide
  VARIANT (1)..(16): Xaa = Any Amino Acid
CCXXEXWCCNPACTGC

SEQ ID NO: 3822 - protein, 17 aa, Artificial Sequence
  Synthetically generated peptide
  VARIANT (1)..(17): Xaa = Any Amino Acid
CCXXEXXWCCNPACTGC

SEQ ID NO: 3823 - protein, 17 aa, Artificial Sequence
  Synthetically generated peptide
  VARIANT (1)..(17): Xaa = Any Amino Acid
CCXXEXWXCCNPACTGC

SEQ ID NO: 3824 - protein, 17 aa, Artificial Sequence
  Synthetically generated peptide
  VARIANT (1)..(17): Xaa = Any Amino Acid
CCXXEXWCCXNPACTGC

SEQ ID NO: 3825 - protein, 17 aa, Artificial Sequence
  Synthetically generated peptide
  VARIANT (1)..(17): Xaa = Any Amino Acid
CCXXEXWCCNXPACTGC

SEQ ID NO: 3826 - protein, 17 aa, Artificial Sequence
  Synthetically generated peptide
  VARIANT (1)..(17): Xaa = Any Amino Acid
CCXXEXWCCNPXACTGC

SEQ ID NO: 3827 - protein, 17 aa, Artificial Sequence
  Synthetically generated peptide
  VARIANT (1)..(17): Xaa = Any Amino Acid
CCXXEXWCCNPAXCTGC

SEQ ID NO: 3828 - protein, 17 aa, Artificial Sequence
  Synthetically generated peptide
  VARIANT (1)..(17): Xaa = Any Amino Acid
CCXXEXWCCNPACXTGC

SEQ ID NO: 3829 - protein, 17 aa, Artificial Sequence
  Synthetically generated peptide
  VARIANT (1)..(17): Xaa = Any Amino Acid
CCXXEXWCCNPACTXGC

SEQ ID NO: 3830 - protein, 17 aa, Artificial Sequence
  Synthetically generated peptide
  VARIANT (1)..(17): Xaa = Any Amino Acid
CCXXEXWCCNPACTGXC

SEQ ID NO: 3831 - protein, 16 aa, Artificial Sequence
  Synthetically generated peptide
  VARIANT (1)..(16): Xaa = Any Amino Acid
CCXXEWXCCNPACTGC

SEQ ID NO: 3832 - protein, 17 aa, Artificial Sequence
  Synthetically generated peptide
  VARIANT (1)..(17): Xaa = Any Amino Acid
CCXXEWXXCCNPACTGC

SEQ ID NO: 3833 - protein, 17 aa, Artificial Sequence
  Synthetically generated peptide
  VARIANT (1)..(17): Xaa = Any Amino Acid
CCXXEWXCCXNPACTGC

SEQ ID NO: 3834 - protein, 17 aa, Artificial Sequence
  Synthetically generated peptide
  VARIANT (1)..(17): Xaa = Any Amino Acid
CCXXEWXCCNXPACTGC

SEQ ID NO: 3835 - protein, 17 aa, Artificial Sequence
  Synthetically generated peptide
  VARIANT (1)..(17): Xaa = Any Amino Acid
CCXXEWXCCNPXACTGC

SEQ ID NO: 3836 - protein, 17 aa, Artificial Sequence
  Synthetically generated peptide
  VARIANT (1)..(17): Xaa = Any Amino Acid
CCXXEWXCCNPAXCTGC

SEQ ID NO: 3837 - protein, 17 aa, Artificial Sequence
  Synthetically generated peptide
  VARIANT (1)..(17): Xaa = Any Amino Acid
CCXXEWXCCNPACXTGC

SEQ ID NO: 3838 - protein, 17 aa, Artificial Sequence
  Synthetically generated peptide
  VARIANT (1)..(17): Xaa = Any Amino Acid
CCXXEWXCCNPACTXGC

SEQ ID NO: 3839 - protein, 17 aa, Artificial Sequence
  Synthetically generated peptide
  VARIANT (1)..(17): Xaa = Any Amino Acid
CCXXEWXCCNPACTGXC

SEQ ID NO: 3840 - protein, 16 aa, Artificial Sequence
  Synthetically generated peptide
  VARIANT (1)..(16): Xaa = Any Amino Acid
CCXXEWCCXNPACTGC

SEQ ID NO: 3841 - protein, 17 aa, Artificial Sequence
  Synthetically generated peptide
  VARIANT (1)..(17): Xaa = Any Amino Acid
CCXXEWCCXXNPACTGC

SEQ ID NO: 3842 - protein, 17 aa, Artificial Sequence
  Synthetically generated peptide
  VARIANT (1)..(17): Xaa = Any Amino Acid
CCXXEWCCXNXPACTGC

SEQ ID NO: 3843 - protein, 17 aa, Artificial Sequence
  Synthetically generated peptide
  VARIANT (1)..(17): Xaa = Any Amino Acid
CCXXEWCCXNPXACTGC

SEQ ID NO: 3844 - protein, 17 aa, Artificial Sequence
  Synthetically generated peptide
  VARIANT (1)..(17): Xaa = Any Amino Acid
CCXXEWCCXNPAXCTGC

SEQ ID NO: 3845 - protein, 17 aa, Artificial Sequence
  Synthetically generated peptide
  VARIANT (1)..(17): Xaa = Any Amino Acid
CCXXEWCCXNPACXTGC

SEQ ID NO: 3846 - protein, 17 aa, Artificial Sequence
  Synthetically generated peptide
  VARIANT (1)..(17): Xaa = Any Amino Acid
CCXXEWCCXNPACTXGC

SEQ ID NO: 3847 - protein, 17 aa, Artificial Sequence
  Synthetically generated peptide
  VARIANT (1)..(17): Xaa = Any Amino Acid
CCXXEWCCXNPACTGXC

SEQ ID NO: 3848 - protein, 16 aa, Artificial Sequence
  Synthetically generated peptide
  VARIANT (1)..(16): Xaa = Any Amino Acid
CCXXEWCCNXPACTGC

SEQ ID NO: 3849 - protein, 17 aa, Artificial Sequence
  Synthetically generated peptide
  VARIANT (1)..(17): Xaa = Any Amino Acid
CCXXEWCCNXXPACTGC

SEQ ID NO: 3850 - protein, 17 aa, Artificial Sequence
  Synthetically generated peptide
  VARIANT (1)..(17): Xaa = Any Amino Acid
CCXXEWCCNXPXACTGC

SEQ ID NO: 3851 - protein, 17 aa, Artificial Sequence
  Synthetically generated peptide
  VARIANT (1)..(17): Xaa = Any Amino Acid
CCXXEWCCNXPAXCTGC

SEQ ID NO: 3852 - protein, 17 aa, Artificial Sequence
  Synthetically generated peptide
  VARIANT (1)..(17): Xaa = Any Amino Acid
CCXXEWCCNXPACXTGC

SEQ ID NO: 3853 - protein, 17 aa, Artificial Sequence
  Synthetically generated peptide
  VARIANT (1)..(17): Xaa = Any Amino Acid
CCXXEWCCNXPACTXGC

SEQ ID NO: 3854 - protein, 17 aa, Artificial Sequence
  Synthetically generated peptide
  VARIANT (1)..(17): Xaa = Any Amino Acid
CCXXEWCCNXPACTGXC

SEQ ID NO: 3855 - protein, 16 aa, Artificial Sequence
  Synthetically generated peptide
  VARIANT (1)..(16): Xaa = Any Amino Acid
CCXXEWCCNPXACTGC

SEQ ID NO: 3856 - protein, 17 aa, Artificial Sequence
  Synthetically generated peptide
  VARIANT (1)..(17): Xaa = Any Amino Acid
CCXXEWCCNPXXACTGC

SEQ ID NO: 3857 - protein, 17 aa, Artificial Sequence
  Synthetically generated peptide
  VARIANT (1)..(17): Xaa = Any Amino Acid
CCXXEWCCNPXAXCTGC

SEQ ID NO: 3858 - protein, 17 aa, Artificial Sequence
  Synthetically generated peptide
  VARIANT (1)..(17): Xaa = Any Amino Acid
CCXXEWCCNPXACXTGC

SEQ ID NO: 3859 - protein, 17 aa, Artificial Sequence
  Synthetically generated peptide
  VARIANT (1)..(17): Xaa = Any Amino Acid
CCXXEWCCNPXACTXGC

SEQ ID NO: 3860 - protein, 17 aa, Artificial Sequence
  Synthetically generated peptide
  VARIANT (1)..(17): Xaa = Any Amino Acid
CCXXEWCCNPXACTGXC

SEQ ID NO: 3861 - protein, 16 aa, Artificial Sequence
  Synthetically generated peptide
  VARIANT (1)..(16): Xaa = Any Amino Acid
CCXXEWCCNPAXCTGC

SEQ ID NO: 3862 - protein, 17 aa, Artificial Sequence
  Synthetically generated peptide
  VARIANT (1)..(17): Xaa = Any Amino Acid
CCXXEWCCNPAXXCTGC

SEQ ID NO: 3863 - protein, 17 aa, Artificial Sequence
  Synthetically generated peptide
  VARIANT (1)..(17): Xaa = Any Amino Acid
CCXXEWCCNPAXCXTGC

SEQ ID NO: 3864 - protein, 17 aa, Artificial Sequence
  Synthetically generated peptide
  VARIANT (1)..(17): Xaa = Any Amino Acid
CCXXEWCCNPAXCTXGC

SEQ ID NO: 3865 - protein, 17 aa, Artificial Sequence
  Synthetically generated peptide
  VARIANT (1)..(17): Xaa = Any Amino Acid
CCXXEWCCNPAXCTGXC

SEQ ID NO: 3866 - protein, 16 aa, Artificial Sequence
  Synthetically generated peptide
  VARIANT (1)..(16): Xaa = Any Amino Acid
CCXXEWCCNPACXTGC

SEQ ID NO: 3867 - protein, 17 aa, Artificial Sequence
  Synthetically generated peptide
  VARIANT (1)..(17): Xaa = Any Amino Acid
CCXXEWCCNPACXXTGC

SEQ ID NO: 3868 - protein, 17 aa, Artificial Sequence
  Synthetically generated peptide
  VARIANT (1)..(17): Xaa = Any Amino Acid
CCXXEWCCNPACXTXGC

SEQ ID NO: 3869 - protein, 17 aa, Artificial Sequence
  Synthetically generated peptide
  VARIANT (1)..(17): Xaa = Any Amino Acid
CCXXEWCCNPACXTGXC

SEQ ID NO: 3870 - protein, 16 aa, Artificial Sequence
  Synthetically generated peptide
  VARIANT (1)..(16): Xaa = Any Amino Acid
CCXXEWCCNPACTXGC

SEQ ID NO: 3871 - protein, 17 aa, Artificial Sequence
  Synthetically generated peptide
  VARIANT (1)..(17): Xaa = Any Amino Acid
CCXXEWCCNPACTXXGC

SEQ ID NO: 3872 - protein, 17 aa, Artificial Sequence
  Synthetically generated peptide
  VARIANT (1)..(17): Xaa = Any Amino Acid
CCXXEWCCNPACTXGXC

SEQ ID NO: 3873 - protein, 16 aa, Artificial Sequence
  Synthetically generated peptide
  VARIANT (1)..(16): Xaa = Any Amino Acid
CCXXEWCCNPACTGXC

SEQ ID NO: 3874 - protein, 17 aa, Artificial Sequence
  Synthetically generated peptide
  VARIANT (1)..(17): Xaa = Any Amino Acid
CCXXEWCCNPACTGXXC

SEQ ID NO: 3875 - protein, 15 aa, Artificial Sequence
  Synthetically generated peptide
  VARIANT (1)..(15): Xaa = Any Amino Acid
CCXEXWCCNPACTGC

SEQ ID NO: 3876 - protein, 16 aa, Artificial Sequence
  Synthetically generated peptide
  VARIANT (1)..(16): Xaa = Any Amino Acid
CCXEXXWCCNPACTGC

SEQ ID NO: 3877 - protein, 17 aa, Artificial Sequence
  Synthetically generated peptide
  VARIANT (1)..(17): Xaa = Any Amino Acid
CCXEXXXWCCNPACTGC

SEQ ID NO: 3878 - protein, 17 aa, Artificial Sequence
  Synthetically generated peptide
  VARIANT (1)..(17): Xaa = Any Amino Acid
CCXEXXWXCCNPACTGC

SEQ ID NO: 3879 - protein, 17 aa, Artificial Sequence
  Synthetically generated peptide
  VARIANT (1)..(17): Xaa = Any Amino Acid
CCXEXXWCCXNPACTGC

SEQ ID NO: 3880 - protein, 17 aa, Artificial Sequence
  Synthetically generated peptide
  VARIANT (1)..(17): Xaa = Any Amino Acid
CCXEXXWCCNXPACTGC

SEQ ID NO: 3881 - protein, 17 aa, Artificial Sequence
  Synthetically generated peptide
  VARIANT (1)..(17): Xaa = Any Amino Acid
CCXEXXWCCNPXACTGC

SEQ ID NO: 3882 - protein, 17 aa, Artificial Sequence
  Synthetically generated peptide
  VARIANT (1)..(17): Xaa = Any Amino Acid
CCXEXXWCCNPAXCTGC

SEQ ID NO: 3883 - protein, 17 aa, Artificial Sequence
  Synthetically generated peptide
  VARIANT (1)..(17): Xaa = Any Amino Acid
CCXEXXWCCNPACXTGC

SEQ ID NO: 3884 - protein, 17 aa, Artificial Sequence
  Synthetically generated peptide
  VARIANT (1)..(17): Xaa = Any Amino Acid
CCXEXXWCCNPACTXGC

SEQ ID NO: 3885 - protein, 17 aa, Artificial Sequence
  Synthetically generated peptide
  VARIANT (1)..(17): Xaa = Any Amino Acid
CCXEXXWCCNPACTGXC

SEQ ID NO: 3886 - protein, 16 aa, Artificial Sequence
  Synthetically generated peptide
  VARIANT (1)..(16): Xaa = Any Amino Acid
CCXEXWXCCNPACTGC

SEQ ID NO: 3887 - protein, 17 aa, Artificial Sequence
  Synthetically generated peptide
  VARIANT (1)..(17): Xaa = Any Amino Acid
CCXEXWXXCCNPACTGC

SEQ ID NO: 3888 - protein, 17 aa, Artificial Sequence
  Synthetically generated peptide
  VARIANT (1)..(17): Xaa = Any Amino Acid
CCXEXWXCCXNPACTGC

SEQ ID NO: 3889 - protein, 17 aa, Artificial Sequence
  Synthetically generated peptide
  VARIANT (1)..(17): Xaa = Any Amino Acid
CCXEXWXCCNXPACTGC

SEQ ID NO: 3890 - protein, 17 aa, Artificial Sequence
  Synthetically generated peptide
  VARIANT (1)..(17): Xaa = Any Amino Acid
CCXEXWXCCNPXACTGC

SEQ ID NO: 3891 - protein, 17 aa, Artificial Sequence
  Synthetically generated peptide
  VARIANT (1)..(17): Xaa = Any Amino Acid
CCXEXWXCCNPAXCTGC

SEQ ID NO: 3892 - protein, 17 aa, Artificial Sequence
  Synthetically generated peptide
  VARIANT (1)..(17): Xaa = Any Amino Acid
CCXEXWXCCNPACXTGC

SEQ ID NO: 3893 - protein, 17 aa, Artificial Sequence
  Synthetically generated peptide
  VARIANT (1)..(17): Xaa = Any Amino Acid
CCXEXWXCCNPACTXGC

SEQ ID NO: 3894 - protein, 17 aa, Artificial Sequence
  Synthetically generated peptide
  VARIANT (1)..(17): Xaa = Any Amino Acid
CCXEXWXCCNPACTGXC

SEQ ID NO: 3895 - protein, 16 aa, Artificial Sequence
  Synthetically generated peptide
  VARIANT (1)..(16): Xaa = Any Amino Acid
CCXEXWCCXNPACTGC

SEQ ID NO: 3896 - protein, 17 aa, Artificial Sequence
  Synthetically generated peptide
  VARIANT (1)..(17): Xaa = Any Amino Acid
CCXEXWCCXXNPACTGC

SEQ ID NO: 3897 - protein, 17 aa, Artificial Sequence
  Synthetically generated peptide
  VARIANT (1)..(17): Xaa = Any Amino Acid
CCXEXWCCXNXPACTGC

SEQ ID NO: 3898 - protein, 17 aa, Artificial Sequence
  Synthetically generated peptide
  VARIANT (1)..(17): Xaa = Any Amino Acid
CCXEXWCCXNPXACTGC

SEQ ID NO: 3899 - protein, 17 aa, Artificial Sequence
  Synthetically generated peptide
  VARIANT (1)..(17): Xaa = Any Amino Acid
CCXEXWCCXNPAXCTGC

SEQ ID NO: 3900 - protein, 17 aa, Artificial Sequence
  Synthetically generated peptide
  VARIANT (1)..(17): Xaa = Any Amino Acid
CCXEXWCCXNPACXTGC

SEQ ID NO: 3901 - protein, 17 aa, Artificial Sequence
  Synthetically generated peptide
  VARIANT (1)..(17): Xaa = Any Amino Acid
CCXEXWCCXNPACTXGC

SEQ ID NO: 3902 - protein, 17 aa, Artificial Sequence
  Synthetically generated peptide
  VARIANT (1)..(17): Xaa = Any Amino Acid
CCXEXWCCXNPACTGXC

SEQ ID NO: 3903 - protein, 16 aa, Artificial Sequence
  Synthetically generated peptide
  VARIANT (1)..(16): Xaa = Any Amino Acid
CCXEXWCCNXPACTGC

SEQ ID NO: 3904 - protein, 17 aa, Artificial Sequence
  Synthetically generated peptide
  VARIANT (1)..(17): Xaa = Any Amino Acid
CCXEXWCCNXXPACTGC

SEQ ID NO: 3905 - protein, 17 aa, Artificial Sequence
  Synthetically generated peptide
  VARIANT (1)..(17): Xaa = Any Amino Acid
CCXEXWCCNXPXACTGC

SEQ ID NO: 3906 - protein, 17 aa, Artificial Sequence
  Synthetically generated peptide
  VARIANT (1)..(17): Xaa = Any Amino Acid
CCXEXWCCNXPAXCTGC

SEQ ID NO: 3907 - protein, 17 aa, Artificial Sequence
  Synthetically generated peptide
  VARIANT (1)..(17): Xaa = Any Amino Acid
CCXEXWCCNXPACXTGC

SEQ ID NO: 3908 - protein, 17 aa, Artificial Sequence
  Synthetically generated peptide
  VARIANT (1)..(17): Xaa = Any Amino Acid
CCXEXWCCNXPACTXGC

SEQ ID NO: 3909 - protein, 17 aa, Artificial Sequence
  Synthetically generated peptide
  VARIANT (1)..(17): Xaa = Any Amino Acid
CCXEXWCCNXPACTGXC

SEQ ID NO: 3910 - protein, 16 aa, Artificial Sequence
  Synthetically generated peptide
  VARIANT (1)..(16): Xaa = Any Amino Acid
CCXEXWCCNPXACTGC

SEQ ID NO: 3911 - protein, 17 aa, Artificial Sequence
  Synthetically generated peptide
  VARIANT (1)..(17): Xaa = Any Amino Acid
CCXEXWCCNPXXACTGC

SEQ ID NO: 3912 - protein, 17 aa, Artificial Sequence
  Synthetically generated peptide
  VARIANT (1)..(17): Xaa = Any Amino Acid
CCXEXWCCNPXAXCTGC

SEQ ID NO: 3913 - protein, 17 aa, Artificial Sequence
  Synthetically generated peptide
  VARIANT (1)..(17): Xaa = Any Amino Acid
CCXEXWCCNPXACXTGC

SEQ ID NO: 3914 - protein, 17 aa, Artificial Sequence
  Synthetically generated peptide
  VARIANT (1)..(17): Xaa = Any Amino Acid
CCXEXWCCNPXACTXGC

SEQ ID NO: 3915 - protein, 17 aa, Artificial Sequence
  Synthetically generated peptide
  VARIANT (1)..(17): Xaa = Any Amino Acid
CCXEXWCCNPXACTGXC

SEQ ID NO: 3916 - protein, 16 aa, Artificial Sequence
  Synthetically generated peptide
  VARIANT (1)..(16): Xaa = Any Amino Acid
CCXEXWCCNPAXCTGC

SEQ ID NO: 3917 - protein, 17 aa, Artificial Sequence
  Synthetically generated peptide
  VARIANT (1)..(17): Xaa = Any Amino Acid
CCXEXWCCNPAXXCTGC

SEQ ID NO: 3918 - protein, 17 aa, Artificial Sequence
  Synthetically generated peptide
  VARIANT (1)..(17): Xaa = Any Amino Acid
CCXEXWCCNPAXCXTGC

SEQ ID NO: 3919 - protein, 17 aa, Artificial Sequence
  Synthetically generated peptide
  VARIANT (1)..(17): Xaa = Any Amino Acid
CCXEXWCCNPAXCTXGC

SEQ ID NO: 3920 - protein, 17 aa, Artificial Sequence
  Synthetically generated peptide
  VARIANT (1)..(17): Xaa = Any Amino Acid
CCXEXWCCNPAXCTGXC

SEQ ID NO: 3921 - protein, 16 aa, Artificial Sequence
  Synthetically generated peptide
  VARIANT (1)..(16): Xaa = Any Amino Acid
CCXEXWCCNPACXTGC

SEQ ID NO: 3922 - protein, 17 aa, Artificial Sequence
  Synthetically generated peptide
  VARIANT (1)..(17): Xaa = Any Amino Acid
CCXEXWCCNPACXXTGC

SEQ ID NO: 3923 - protein, 17 aa, Artificial Sequence
  Synthetically generated peptide
  VARIANT (1)..(17): Xaa = Any Amino Acid
CCXEXWCCNPACXTXGC

SEQ ID NO: 3924 - protein, 17 aa, Artificial Sequence
  Synthetically generated peptide
  VARIANT (1)..(17): Xaa = Any Amino Acid
CCXEXWCCNPACXTGXC

SEQ ID NO: 3925 - protein, 16 aa, Artificial Sequence
  Synthetically generated peptide
  VARIANT (1)..(16): Xaa = Any Amino Acid
CCXEXWCCNPACTXGC

SEQ ID NO: 3926 - protein, 17 aa, Artificial Sequence
  Synthetically generated peptide
  VARIANT (1)..(17): Xaa = Any Amino Acid
CCXEXWCCNPACTXXGC

SEQ ID NO: 3927 - protein, 17 aa, Artificial Sequence
  Synthetically generated peptide
  VARIANT (1)..(17): Xaa = Any Amino Acid
CCXEXWCCNPACTXGXC

SEQ ID NO: 3928 - protein, 16 aa, Artificial Sequence
  Synthetically generated peptide
  VARIANT (1)..(16): Xaa = Any Amino Acid
CCXEXWCCNPACTGXC

SEQ ID NO: 3929 - protein, 17 aa, Artificial Sequence
  Synthetically generated peptide
  VARIANT (1)..(17): Xaa = Any Amino Acid
CCXEXWCCNPACTGXXC

SEQ ID NO: 3930 - protein, 15 aa, Artificial Sequence
  Synthetically generated peptide
  VARIANT (1)..(15): Xaa = Any Amino Acid
CCXEWXCCNPACTGC

SEQ ID NO: 3931 - protein, 16 aa, Artificial Sequence
  Synthetically generated peptide
  VARIANT (1)..(16): Xaa = Any Amino Acid
CCXEWXXCCNPACTGC

SEQ ID NO: 3932 - protein, 17 aa, Artificial Sequence
  Synthetically generated peptide
  VARIANT (1)..(17): Xaa = Any Amino Acid
CCXEWXXXCCNPACTGC

SEQ ID NO: 3933 - protein, 17 aa, Artificial Sequence
  Synthetically generated peptide
  VARIANT (1)..(17): Xaa = Any Amino Acid
CCXEWXXCCXNPACTGC

SEQ ID NO: 3934 - protein, 17 aa, Artificial Sequence
  Synthetically generated peptide
  VARIANT (1)..(17): Xaa = Any Amino Acid
CCXEWXXCCNXPACTGC

SEQ ID NO: 3935 - protein, 17 aa, Artificial Sequence
  Synthetically generated peptide
  VARIANT (1)..(17): Xaa = Any Amino Acid
CCXEWXXCCNPXACTGC

SEQ ID NO: 3936 - protein, 17 aa, Artificial Sequence
  Synthetically generated peptide
  VARIANT (1)..(17): Xaa = Any Amino Acid
CCXEWXXCCNPAXCTGC

SEQ ID NO: 3937 - protein, 17 aa, Artificial Sequence
  Synthetically generated peptide
  VARIANT (1)..(17): Xaa = Any Amino Acid
CCXEWXXCCNPACXTGC

SEQ ID NO: 3938 - protein, 17 aa, Artificial Sequence
  Synthetically generated peptide
  VARIANT (1)..(17): Xaa = Any Amino Acid
CCXEWXXCCNPACTXGC

SEQ ID NO: 3939 - protein, 17 aa, Artificial Sequence
  Synthetically generated peptide
  VARIANT (1)..(17): Xaa = Any Amino Acid
CCXEWXXCCNPACTGXC

SEQ ID NO: 3940 - protein, 16 aa, Artificial Sequence
  Synthetically generated peptide
  VARIANT (1)..(16): Xaa = Any Amino Acid
CCXEWXCCXNPACTGC

SEQ ID NO: 3941 - protein, 17 aa, Artificial Sequence
  Synthetically generated peptide
  VARIANT (1)..(17): Xaa = Any Amino Acid
CCXEWXCCXXNPACTGC

SEQ ID NO: 3942 - protein, 17 aa, Artificial Sequence
  Synthetically generated peptide
  VARIANT (1)..(17): Xaa = Any Amino Acid
CCXEWXCCXNXPACTGC

SEQ ID NO: 3943 - protein, 17 aa, Artificial Sequence
  Synthetically generated peptide
  VARIANT (1)..(17): Xaa = Any Amino Acid
CCXEWXCCXNPXACTGC

SEQ ID NO: 3944 - protein, 17 aa, Artificial Sequence
  Synthetically generated peptide
  VARIANT (1)..(17): Xaa = Any Amino Acid
CCXEWXCCXNPAXCTGC

SEQ ID NO: 3945 - protein, 17 aa, Artificial Sequence
  Synthetically generated peptide
  VARIANT (1)..(17): Xaa = Any Amino Acid
CCXEWXCCXNPACXTGC

SEQ ID NO: 3946 - protein, 17 aa, Artificial Sequence
  Synthetically generated peptide
  VARIANT (1)..(17): Xaa = Any Amino Acid
CCXEWXCCXNPACTXGC

SEQ ID NO: 3947 - protein, 17 aa, Artificial Sequence
  Synthetically generated peptide
  VARIANT (1)..(17): Xaa = Any Amino Acid
CCXEWXCCXNPACTGXC

SEQ ID NO: 3948 - protein, 16 aa, Artificial Sequence
  Synthetically generated peptide
  VARIANT (1)..(16): Xaa = Any Amino Acid
CCXEWXCCNXPACTGC

SEQ ID NO: 3949 - protein, 17 aa, Artificial Sequence
  Synthetically generated peptide
  VARIANT (1)..(17): Xaa = Any Amino Acid
CCXEWXCCNXXPACTGC

SEQ ID NO: 3950 - protein, 17 aa, Artificial Sequence
  Synthetically generated peptide
  VARIANT (1)..(17): Xaa = Any Amino Acid
CCXEWXCCNXPXACTGC

SEQ ID NO: 3951 - protein, 17 aa, Artificial Sequence
  Synthetically generated peptide
  VARIANT (1)..(17): Xaa = Any Amino Acid
CCXEWXCCNXPAXCTGC

SEQ ID NO: 3952 - protein, 17 aa, Artificial Sequence
  Synthetically generated peptide
  VARIANT (1)..(17): Xaa = Any Amino Acid
CCXEWXCCNXPACXTGC

SEQ ID NO: 3953 - protein, 17 aa, Artificial Sequence
  Synthetically generated peptide
  VARIANT (1)..(17): Xaa = Any Amino Acid
CCXEWXCCNXPACTXGC

SEQ ID NO: 3954 - protein, 17 aa, Artificial Sequence
  Synthetically generated peptide
  VARIANT (1)..(17): Xaa = Any Amino Acid
CCXEWXCCNXPACTGXC

SEQ ID NO: 3955 - protein, 16 aa, Artificial Sequence
  Synthetically generated peptide
  VARIANT (1)..(16): Xaa = Any Amino Acid
CCXEWXCCNPXACTGC

SEQ ID NO: 3956 - protein, 17 aa, Artificial Sequence
  Synthetically generated peptide
  VARIANT (1)..(17): Xaa = Any Amino Acid
CCXEWXCCNPXXACTGC

SEQ ID NO: 3957 - protein, 17 aa, Artificial Sequence
  Synthetically generated peptide
  VARIANT (1)..(17): Xaa = Any Amino Acid
CCXEWXCCNPXAXCTGC

SEQ ID NO: 3958 - protein, 17 aa, Artificial Sequence
  Synthetically generated peptide
  VARIANT (1)..(17): Xaa = Any Amino Acid
CCXEWXCCNPXACXTGC

SEQ ID NO: 3959 - protein, 17 aa, Artificial Sequence
  Synthetically generated peptide
  VARIANT (1)..(17): Xaa = Any Amino Acid
CCXEWXCCNPXACTXGC

SEQ ID NO: 3960 - protein, 17 aa, Artificial Sequence
  Synthetically generated peptide
  VARIANT (1)..(17): Xaa = Any Amino Acid
CCXEWXCCNPXACTGXC

SEQ ID NO: 3961 - protein, 16 aa, Artificial Sequence
  Synthetically generated peptide
  VARIANT (1)..(16): Xaa = Any Amino Acid
CCXEWXCCNPAXCTGC

SEQ ID NO: 3962 - protein, 17 aa, Artificial Sequence
  Synthetically generated peptide
  VARIANT (1)..(17): Xaa = Any Amino Acid
CCXEWXCCNPAXXCTGC

SEQ ID NO: 3963 - protein, 17 aa, Artificial Sequence
  Synthetically generated peptide
  VARIANT (1)..(17): Xaa = Any Amino Acid
CCXEWXCCNPAXCXTGC

SEQ ID NO: 3964 - protein, 17 aa, Artificial Sequence
  Synthetically generated peptide
  VARIANT (1)..(17): Xaa = Any Amino Acid
CCXEWXCCNPAXCTXGC

SEQ ID NO: 3965 - protein, 17 aa, Artificial Sequence
  Synthetically generated peptide
  VARIANT (1)..(17): Xaa = Any Amino Acid
CCXEWXCCNPAXCTGXC

SEQ ID NO: 3966 - protein, 16 aa, Artificial Sequence
  Synthetically generated peptide
  VARIANT (1)..(16): Xaa = Any Amino Acid
CCXEWXCCNPACXTGC

SEQ ID NO: 3967 - protein, 17 aa, Artificial Sequence
  Synthetically generated peptide
  VARIANT (1)..(17): Xaa = Any Amino Acid
CCXEWXCCNPACXXTGC

SEQ ID NO: 3968 - protein, 17 aa, Artificial Sequence
  Synthetically generated peptide
  VARIANT (1)..(17): Xaa = Any Amino Acid
CCXEWXCCNPACXTXGC

SEQ ID NO: 3969 - protein, 17 aa, Artificial Sequence
  Synthetically generated peptide
  VARIANT (1)..(17): Xaa = Any Amino Acid
CCXEWXCCNPACXTGXC

SEQ ID NO: 3970 - protein, 16 aa, Artificial Sequence
  Synthetically generated peptide
  VARIANT (1)..(16): Xaa = Any Amino Acid
CCXEWXCCNPACTXGC

SEQ ID NO: 3971 - protein, 17 aa, Artificial Sequence
  Synthetically generated peptide
  VARIANT (1)..(17): Xaa = Any Amino Acid
CCXEWXCCNPACTXXGC

SEQ ID NO: 3972 - protein, 17 aa, Artificial Sequence
  Synthetically generated peptide
  VARIANT (1)..(17): Xaa = Any Amino Acid
CCXEWXCCNPACTXGXC

SEQ ID NO: 3973 - protein, 16 aa, Artificial Sequence
  Synthetically generated peptide
  VARIANT (1)..(16): Xaa = Any Amino Acid
CCXEWXCCNPACTGXC

SEQ ID NO: 3974 - protein, 17 aa, Artificial Sequence
  Synthetically generated peptide
  VARIANT (1)..(17): Xaa = Any Amino Acid
CCXEWXCCNPACTGXXC

SEQ ID NO: 3975 - protein, 15 aa, Artificial Sequence
  Synthetically generated peptide
  VARIANT (1)..(15): Xaa = Any Amino Acid
CCXEWCCXNPACTGC

SEQ ID NO: 3976 - protein, 16 aa, Artificial Sequence
  Synthetically generated peptide
  VARIANT (1)..(16): Xaa = Any Amino Acid
CCXEWCCXXNPACTGC

SEQ ID NO: 3977 - protein, 17 aa, Artificial Sequence
  Synthetically generated peptide
  VARIANT (1)..(17): Xaa = Any Amino Acid
CCXEWCCXXXNPACTGC

SEQ ID NO: 3978 - protein, 17 aa, Artificial Sequence
  Synthetically generated peptide
  VARIANT (1)..(17): Xaa = Any Amino Acid
CCXEWCCXXNXPACTGC

SEQ ID NO: 3979 - protein, 17 aa, Artificial Sequence
  Synthetically generated peptide
  VARIANT (1)..(17): Xaa = Any Amino Acid
CCXEWCCXXNPXACTGC

SEQ ID NO: 3980 - protein, 17 aa, Artificial Sequence
  Synthetically generated peptide
  VARIANT (1)..(17): Xaa = Any Amino Acid
CCXEWCCXXNPAXCTGC

SEQ ID NO: 3981 - protein, 17 aa, Artificial Sequence
  Synthetically generated peptide
  VARIANT (1)..(17): Xaa = Any Amino Acid
CCXEWCCXXNPACXTGC

SEQ ID NO: 3982 - protein, 17 aa, Artificial Sequence
  Synthetically generated peptide
  VARIANT (1)..(17): Xaa = Any Amino Acid
CCXEWCCXXNPACTXGC

SEQ ID NO: 3983 - protein, 17 aa, Artificial Sequence
  Synthetically generated peptide
  VARIANT (1)..(17): Xaa = Any Amino Acid
CCXEWCCXXNPACTGXC

SEQ ID NO: 3984 - protein, 16 aa, Artificial Sequence
  Synthetically generated peptide
  VARIANT (1)..(16): Xaa = Any Amino Acid
CCXEWCCXNXPACTGC

SEQ ID NO: 3985 - protein, 17 aa, Artificial Sequence
  Synthetically generated peptide
  VARIANT (1)..(17): Xaa = Any Amino Acid
CCXEWCCXNXXPACTGC

SEQ ID NO: 3986 - protein, 17 aa, Artificial Sequence
  Synthetically generated peptide
  VARIANT (1)..(17): Xaa = Any Amino Acid
CCXEWCCXNXPXACTGC

SEQ ID NO: 3987 - protein, 17 aa, Artificial Sequence
  Synthetically generated peptide
  VARIANT (1)..(17): Xaa = Any Amino Acid
CCXEWCCXNXPAXCTGC

SEQ ID NO: 3988 - protein, 17 aa, Artificial Sequence
  Synthetically generated peptide
  VARIANT (1)..(17): Xaa = Any Amino Acid
CCXEWCCXNXPACXTGC

SEQ ID NO: 3989 - protein, 17 aa, Artificial Sequence
  Synthetically generated peptide
  VARIANT (1)..(17): Xaa = Any Amino Acid
CCXEWCCXNXPACTXGC

SEQ ID NO: 3990 - protein, 17 aa, Artificial Sequence
  Synthetically generated peptide
  VARIANT (1)..(17): Xaa = Any Amino Acid
CCXEWCCXNXPACTGXC

SEQ ID NO: 3991 - protein, 16 aa, Artificial Sequence
  Synthetically generated peptide
  VARIANT (1)..(16): Xaa = Any Amino Acid
CCXEWCCXNPXACTGC

SEQ ID NO: 3992 - protein, 17 aa, Artificial Sequence
  Synthetically generated peptide
  VARIANT (1)..(17): Xaa = Any Amino Acid
CCXEWCCXNPXXACTGC

SEQ ID NO: 3993 - protein, 17 aa, Artificial Sequence
  Synthetically generated peptide
  VARIANT (1)..(17): Xaa = Any Amino Acid
CCXEWCCXNPXAXCTGC

SEQ ID NO: 3994 - protein, 17 aa, Artificial Sequence
  Synthetically generated peptide
  VARIANT (1)..(17): Xaa = Any Amino Acid
CCXEWCCXNPXACXTGC

SEQ ID NO: 3995 - protein, 17 aa, Artificial Sequence
  Synthetically generated peptide
  VARIANT (1)..(17): Xaa = Any Amino Acid
CCXEWCCXNPXACTXGC

SEQ ID NO: 3996 - protein, 17 aa, Artificial Sequence
  Synthetically generated peptide
  VARIANT (1)..(17): Xaa = Any Amino Acid
CCXEWCCXNPXACTGXC

SEQ ID NO: 3997 - protein, 16 aa, Artificial Sequence
  Synthetically generated peptide
  VARIANT (1)..(16): Xaa = Any Amino Acid
CCXEWCCXNPAXCTGC

SEQ ID NO: 3998 - protein, 17 aa, Artificial Sequence
  Synthetically generated peptide
  VARIANT (1)..(17): Xaa = Any Amino Acid
CCXEWCCXNPAXXCTGC

SEQ ID NO: 3999 - protein, 17 aa, Artificial Sequence
  Synthetically generated peptide
  VARIANT (1)..(17): Xaa = Any Amino Acid
CCXEWCCXNPAXCXTGC

SEQ ID NO: 4000 - protein, 17 aa, Artificial Sequence
  Synthetically generated peptide
  VARIANT (1)..(17): Xaa = Any Amino Acid
CCXEWCCXNPAXCTXGC

SEQ ID NO: 4001 - protein, 17 aa, Artificial Sequence
  Synthetically generated peptide
  VARIANT (1)..(17): Xaa = Any Amino Acid
CCXEWCCXNPAXCTGXC

SEQ ID NO: 4002 - protein, 16 aa, Artificial Sequence
  Synthetically generated peptide
  VARIANT (1)..(16): Xaa = Any Amino Acid
CCXEWCCXNPACXTGC

SEQ ID NO: 4003 - protein, 17 aa, Artificial Sequence
  Synthetically generated peptide
  VARIANT (1)..(17): Xaa = Any Amino Acid
CCXEWCCXNPACXXTGC

SEQ ID NO: 4004 - protein, 17 aa, Artificial Sequence
  Synthetically generated peptide
  VARIANT (1)..(17): Xaa = Any Amino Acid
CCXEWCCXNPACXTXGC

SEQ ID NO: 4005 - protein, 17 aa, Artificial Sequence
  Synthetically generated peptide
  VARIANT (1)..(17): Xaa = Any Amino Acid
CCXEWCCXNPACXTGXC

SEQ ID NO: 4006 - protein, 16 aa, Artificial Sequence
  Synthetically generated peptide
  VARIANT (1)..(16): Xaa = Any Amino Acid
CCXEWCCXNPACTXGC

SEQ ID NO: 4007 - protein, 17 aa, Artificial Sequence
  Synthetically generated peptide
  VARIANT (1)..(17): Xaa = Any Amino Acid
CCXEWCCXNPACTXXGC

SEQ ID NO: 4008 - protein, 17 aa, Artificial Sequence
  Synthetically generated peptide
  VARIANT (1)..(17): Xaa = Any Amino Acid
CCXEWCCXNPACTXGXC

SEQ ID NO: 4009 - protein, 16 aa, Artificial Sequence
  Synthetically generated peptide
  VARIANT (1)..(16): Xaa = Any Amino Acid
CCXEWCCXNPACTGXC

SEQ ID NO: 4010 - protein, 17 aa, Artificial Sequence
  Synthetically generated peptide
  VARIANT (1)..(17): Xaa = Any Amino Acid
CCXEWCCXNPACTGXXC

SEQ ID NO: 4011 - protein, 15 aa, Artificial Sequence
  Synthetically generated peptide
  VARIANT (1)..(15): Xaa = Any Amino Acid
CCXEWCCNXPACTGC

SEQ ID NO: 4012 - protein, 16 aa, Artificial Sequence
  Synthetically generated peptide
  VARIANT (1)..(16): Xaa = Any Amino Acid
CCXEWCCNXXPACTGC

SEQ ID NO: 4013 - protein, 17 aa, Artificial Sequence
  Synthetically generated peptide
  VARIANT (1)..(17): Xaa = Any Amino Acid
CCXEWCCNXXXPACTGC

SEQ ID NO: 4014 - protein, 17 aa, Artificial Sequence
  Synthetically generated peptide
  VARIANT (1)..(17): Xaa = Any Amino Acid
CCXEWCCNXXPXACTGC

SEQ ID NO: 4015 - protein, 17 aa, Artificial Sequence
  Synthetically generated peptide
  VARIANT (1)..(17): Xaa = Any Amino Acid
CCXEWCCNXXPAXCTGC

SEQ ID NO: 4016 - protein, 17 aa, Artificial Sequence
  Synthetically generated peptide
  VARIANT (1)..(17): Xaa = Any Amino Acid
CCXEWCCNXXPACXTGC

SEQ ID NO: 4017 - protein, 17 aa, Artificial Sequence
  Synthetically generated peptide
  VARIANT (1)..(17): Xaa = Any Amino Acid
CCXEWCCNXXPACTXGC

SEQ ID NO: 4018 - protein, 17 aa, Artificial Sequence
  Synthetically generated peptide
  VARIANT (1)..(17): Xaa = Any Amino Acid
CCXEWCCNXXPACTGXC

SEQ ID NO: 4019 - protein, 16 aa, Artificial Sequence
  Synthetically generated peptide
  VARIANT (1)..(16): Xaa = Any Amino Acid
CCXEWCCNXPXACTGC

SEQ ID NO: 4020 - protein, 17 aa, Artificial Sequence
  Synthetically generated peptide
  VARIANT (1)..(17): Xaa = Any Amino Acid
CCXEWCCNXPXXACTGC

SEQ ID NO: 4021 - protein, 17 aa, Artificial Sequence
  Synthetically generated peptide
  VARIANT (1)..(17): Xaa = Any Amino Acid
CCXEWCCNXPXAXCTGC

SEQ ID NO: 4022 - protein, 17 aa, Artificial Sequence
  Synthetically generated peptide
  VARIANT (1)..(17): Xaa = Any Amino Acid
CCXEWCCNXPXACXTGC

SEQ ID NO: 4023 - protein, 17 aa, Artificial Sequence
  Synthetically generated peptide
  VARIANT (1)..(17): Xaa = Any Amino Acid
CCXEWCCNXPXACTXGC

SEQ ID NO: 4024 - protein, 17 aa, Artificial Sequence
  Synthetically generated peptide
  VARIANT (1)..(17): Xaa = Any Amino Acid
CCXEWCCNXPXACTGXC

SEQ ID NO: 4025 - protein, 16 aa, Artificial Sequence
  Synthetically generated peptide
  VARIANT (1)..(16): Xaa = Any Amino Acid
CCXEWCCNXPAXCTGC

SEQ ID NO: 4026 - protein, 17 aa, Artificial Sequence
  Synthetically generated peptide
  VARIANT (1)..(17): Xaa = Any Amino Acid
CCXEWCCNXPAXXCTGC

SEQ ID NO: 4027 - protein, 17 aa, Artificial Sequence
  Synthetically generated peptide
  VARIANT (1)..(17): Xaa = Any Amino Acid
CCXEWCCNXPAXCXTGC

SEQ ID NO: 4028 - protein, 17 aa, Artificial Sequence
  Synthetically generated peptide
  VARIANT (1)..(17): Xaa = Any Amino Acid
CCXEWCCNXPAXCTXGC

SEQ ID NO: 4029 - protein, 17 aa, Artificial Sequence
  Synthetically generated peptide
  VARIANT (1)..(17): Xaa = Any Amino Acid
CCXEWCCNXPAXCTGXC

SEQ ID NO: 4030 - protein, 16 aa, Artificial Sequence
  Synthetically generated peptide
  VARIANT (1)..(16): Xaa = Any Amino Acid
CCXEWCCNXPACXTGC

SEQ ID NO: 4031 - protein, 17 aa, Artificial Sequence
  Synthetically generated peptide
  VARIANT (1)..(17): Xaa = Any Amino Acid
CCXEWCCNXPACXXTGC

SEQ ID NO: 4032 - protein, 17 aa, Artificial Sequence
  Synthetically generated peptide
  VARIANT (1)..(17): Xaa = Any Amino Acid
CCXEWCCNXPACXTXGC

SEQ ID NO: 4033 - protein, 17 aa, Artificial Sequence
  Synthetically generated peptide
  VARIANT (1)..(17): Xaa = Any Amino Acid
CCXEWCCNXPACXTGXC

SEQ ID NO: 4034 - protein, 16 aa, Artificial Sequence
  Synthetically generated peptide
  VARIANT (1)..(16): Xaa = Any Amino Acid
CCXEWCCNXPACTXGC

SEQ ID NO: 4035 - protein, 17 aa, Artificial Sequence
  Synthetically generated peptide
  VARIANT (1)..(17): Xaa = Any Amino Acid
CCXEWCCNXPACTXXGC

SEQ ID NO: 4036 - protein, 17 aa, Artificial Sequence
  Synthetically generated peptide
  VARIANT (1)..(17): Xaa = Any Amino Acid
CCXEWCCNXPACTXGXC

SEQ ID NO: 4037 - protein, 16 aa, Artificial Sequence
  Synthetically generated peptide
  VARIANT (1)..(16): Xaa = Any Amino Acid
CCXEWCCNXPACTGXC

SEQ ID NO: 4038 - protein, 17 aa, Artificial Sequence
  Synthetically generated peptide
  VARIANT (1)..(17): Xaa = Any Amino Acid
CCXEWCCNXPACTGXXC

SEQ ID NO: 4039 - protein, 15 aa, Artificial Sequence
  Synthetically generated peptide
  VARIANT (1)..(15): Xaa = Any Amino Acid
CCXEWCCNPXACTGC

SEQ ID NO: 4040 - protein, 16 aa, Artificial Sequence
  Synthetically generated peptide
  VARIANT (1)..(16): Xaa = Any Amino Acid
CCXEWCCNPXXACTGC

SEQ ID NO: 4041 - protein, 17 aa, Artificial Sequence
  Synthetically generated peptide
  VARIANT (1)..(17): Xaa = Any Amino Acid
CCXEWCCNPXXXACTGC

SEQ ID NO: 4042 - protein, 17 aa, Artificial Sequence
  Synthetically generated peptide
  VARIANT (1)..(17): Xaa = Any Amino Acid
CCXEWCCNPXXAXCTGC

SEQ ID NO: 4043 - protein, 17 aa, Artificial Sequence
  Synthetically generated peptide
  VARIANT (1)..(17): Xaa = Any Amino Acid
CCXEWCCNPXXACXTGC

SEQ ID NO: 4044 - protein, 17 aa, Artificial Sequence
  Synthetically generated peptide
  VARIANT (1)..(17): Xaa = Any Amino Acid
CCXEWCCNPXXACTXGC

SEQ ID NO: 4045 - protein, 17 aa, Artificial Sequence
  Synthetically generated peptide
  VARIANT (1)..(17): Xaa = Any Amino Acid
CCXEWCCNPXXACTGXC

SEQ ID NO: 4046 - protein, 16 aa, Artificial Sequence
  Synthetically generated peptide
  VARIANT (1)..(16): Xaa = Any Amino Acid
CCXEWCCNPXAXCTGC

SEQ ID NO: 4047 - protein, 17 aa, Artificial Sequence
  Synthetically generated peptide
  VARIANT (1)..(17): Xaa = Any Amino Acid
CCXEWCCNPXAXXCTGC

SEQ ID NO: 4048 - protein, 17 aa, Artificial Sequence
  Synthetically generated peptide
  VARIANT (1)..(17): Xaa = Any Amino Acid
CCXEWCCNPXAXCXTGC

SEQ ID NO: 4049 - protein, 17 aa, Artificial Sequence
  Synthetically generated peptide
  VARIANT (1)..(17): Xaa = Any Amino Acid
CCXEWCCNPXAXCTXGC

SEQ ID NO: 4050 - protein, 17 aa, Artificial Sequence
  Synthetically generated peptide
  VARIANT (1)..(17): Xaa = Any Amino Acid
CCXEWCCNPXAXCTGXC

SEQ ID NO: 4051 - protein, 16 aa, Artificial Sequence
  Synthetically generated peptide
  VARIANT (1)..(16): Xaa = Any Amino Acid
CCXEWCCNPXACXTGC

SEQ ID NO: 4052 - protein, 17 aa, Artificial Sequence
  Synthetically generated peptide
  VARIANT (1)..(17): Xaa = Any Amino Acid
CCXEWCCNPXACXXTGC

SEQ ID NO: 4053 - protein, 17 aa, Artificial Sequence
  Synthetically generated peptide
  VARIANT (1)..(17): Xaa = Any Amino Acid
CCXEWCCNPXACXTXGC

SEQ ID NO: 4054 - protein, 17 aa, Artificial Sequence
  Synthetically generated peptide
  VARIANT (1)..(17): Xaa = Any Amino Acid
CCXEWCCNPXACXTGXC

SEQ ID NO: 4055 - protein, 16 aa, Artificial Sequence
  Synthetically generated peptide
  VARIANT (1)..(16): Xaa = Any Amino Acid
CCXEWCCNPXACTXGC

SEQ ID NO: 4056 - protein, 17 aa, Artificial Sequence
  Synthetically generated peptide
  VARIANT (1)..(17): Xaa = Any Amino Acid
CCXEWCCNPXACTXXGC

SEQ ID NO: 4057 - protein, 17 aa, Artificial Sequence
  Synthetically generated peptide
  VARIANT (1)..(17): Xaa = Any Amino Acid
CCXEWCCNPXACTXGXC

SEQ ID NO: 4058 - protein, 16 aa, Artificial Sequence
  Synthetically generated peptide
  VARIANT (1)..(16): Xaa = Any Amino Acid
CCXEWCCNPXACTGXC

SEQ ID NO: 4059 - protein, 17 aa, Artificial Sequence
  Synthetically generated peptide
  VARIANT (1)..(17): Xaa = Any Amino Acid
CCXEWCCNPXACTGXXC

SEQ ID NO: 4060 - protein, 15 aa, Artificial Sequence
  Synthetically generated peptide
  VARIANT (1)..(15): Xaa = Any Amino Acid
CCXEWCCNPAXCTGC

SEQ ID NO: 4061 - protein, 16 aa, Artificial Sequence
  Synthetically generated peptide
  VARIANT (1)..(16): Xaa = Any Amino Acid
CCXEWCCNPAXXCTGC

SEQ ID NO: 4062 - protein, 17 aa, Artificial Sequence
  Synthetically generated peptide
  VARIANT (1)..(17): Xaa = Any Amino Acid
CCXEWCCNPAXXXCTGC

SEQ ID NO: 4063 - protein, 17 aa, Artificial Sequence
  Synthetically generated peptide
  VARIANT (1)..(17): Xaa = Any Amino Acid
CCXEWCCNPAXXCXTGC

SEQ ID NO: 4064 - protein, 17 aa, Artificial Sequence
  Synthetically generated peptide
  VARIANT (1)..(17): Xaa = Any Amino Acid
CCXEWCCNPAXXCTXGC

SEQ ID NO: 4065 - protein, 17 aa, Artificial Sequence
  Synthetically generated peptide
  VARIANT (1)..(17): Xaa = Any Amino Acid
CCXEWCCNPAXXCTGXC

SEQ ID NO: 4066 - protein, 16 aa, Artificial Sequence
  Synthetically generated peptide
  VARIANT (1)..(16): Xaa = Any Amino Acid
CCXEWCCNPAXCXTGC

SEQ ID NO: 4067 - protein, 17 aa, Artificial Sequence
  Synthetically generated peptide
  VARIANT (1)..(17): Xaa = Any Amino Acid
CCXEWCCNPAXCXXTGC

SEQ ID NO: 4068 - protein, 17 aa, Artificial Sequence
  Synthetically generated peptide
  VARIANT (1)..(17): Xaa = Any Amino Acid
CCXEWCCNPAXCXTXGC

SEQ ID NO: 4069 - protein, 17 aa, Artificial Sequence
  Synthetically generated peptide
  VARIANT (1)..(17): Xaa = Any Amino Acid
CCXEWCCNPAXCXTGXC

SEQ ID NO: 4070 - protein, 16 aa, Artificial Sequence
  Synthetically generated peptide
  VARIANT (1)..(16): Xaa = Any Amino Acid
CCXEWCCNPAXCTXGC

SEQ ID NO: 4071 - protein, 17 aa, Artificial Sequence
  Synthetically generated peptide
  VARIANT (1)..(17): Xaa = Any Amino Acid
CCXEWCCNPAXCTXXGC

SEQ ID NO: 4072 - protein, 17 aa, Artificial Sequence
  Synthetically generated peptide
  VARIANT (1)..(17): Xaa = Any Amino Acid
CCXEWCCNPAXCTXGXC

SEQ ID NO: 4073 - protein, 16 aa, Artificial Sequence
  Synthetically generated peptide
  VARIANT (1)..(16): Xaa = Any Amino Acid
CCXEWCCNPAXCTGXC

SEQ ID NO: 4074 - protein, 17 aa, Artificial Sequence
  Synthetically generated peptide
  VARIANT (1)..(17): Xaa = Any Amino Acid
CCXEWCCNPAXCTGXXC

SEQ ID NO: 4075 - protein, 15 aa, Artificial Sequence
  Synthetically generated peptide
  VARIANT (1)..(15): Xaa = Any Amino Acid
CCXEWCCNPACXTGC

SEQ ID NO: 4076 - protein, 16 aa, Artificial Sequence
  Synthetically generated peptide
  VARIANT (1)..(16): Xaa = Any Amino Acid
CCXEWCCNPACXXTGC

SEQ ID NO: 4077 - protein, 17 aa, Artificial Sequence
  Synthetically generated peptide
  VARIANT (1)..(17): Xaa = Any Amino Acid
CCXEWCCNPACXXXTGC

SEQ ID NO: 4078 - protein, 17 aa, Artificial Sequence
  Synthetically generated peptide
  VARIANT (1)..(17): Xaa = Any Amino Acid
CCXEWCCNPACXXTXGC

SEQ ID NO: 4079 - protein, 17 aa, Artificial Sequence
  Synthetically generated peptide
  VARIANT (1)..(17): Xaa = Any Amino Acid
CCXEWCCNPACXXTGXC

SEQ ID NO: 4080 - protein, 16 aa, Artificial Sequence
  Synthetically generated peptide
  VARIANT (1)..(16): Xaa = Any Amino Acid
CCXEWCCNPACXTXGC

SEQ ID NO: 4081 - protein, 17 aa, Artificial Sequence
  Synthetically generated peptide
  VARIANT (1)..(17): Xaa = Any Amino Acid
CCXEWCCNPACXTXXGC

SEQ ID NO: 4082 - protein, 17 aa, Artificial Sequence
  Synthetically generated peptide
  VARIANT (1)..(17): Xaa = Any Amino Acid
CCXEWCCNPACXTXGXC

SEQ ID NO: 4083 - protein, 16 aa, Artificial Sequence
  Synthetically generated peptide
  VARIANT (1)..(16): Xaa = Any Amino Acid
CCXEWCCNPACXTGXC

SEQ ID NO: 4084 - protein, 17 aa, Artificial Sequence
  Synthetically generated peptide
  VARIANT (1)..(17): Xaa = Any Amino Acid
CCXEWCCNPACXTGXXC

SEQ ID NO: 4085 - protein, 15 aa, Artificial Sequence
  Synthetically generated peptide
  VARIANT (1)..(15): Xaa = Any Amino Acid
CCXEWCCNPACTXGC

SEQ ID NO: 4086 - protein, 16 aa, Artificial Sequence
  Synthetically generated peptide
  VARIANT (1)..(16): Xaa = Any Amino Acid
CCXEWCCNPACTXXGC

SEQ ID NO: 4087 - protein, 17 aa, Artificial Sequence
  Synthetically generated peptide
  VARIANT (1)..(17): Xaa = Any Amino Acid
CCXEWCCNPACTXXXGC

SEQ ID NO: 4088 - protein, 17 aa, Artificial Sequence
  Synthetically generated peptide
  VARIANT (1)..(17): Xaa = Any Amino Acid
CCXEWCCNPACTXXGXC

SEQ ID NO: 4089 - protein, 16 aa, Artificial Sequence
  Synthetically generated peptide
  VARIANT (1)..(16): Xaa = Any Amino Acid
CCXEWCCNPACTXGXC

SEQ ID NO: 4090 - protein, 17 aa, Artificial Sequence
  Synthetically generated peptide
  VARIANT (1)..(17): Xaa = Any Amino Acid
CCXEWCCNPACTXGXXC

SEQ ID NO: 4091 - protein, 15 aa, Artificial Sequence
  Synthetically generated peptide
  VARIANT (1)..(15): Xaa = Any Amino Acid
CCXEWCCNPACTGXC

SEQ ID NO: 4092 - protein, 16 aa, Artificial Sequence
  Synthetically generated peptide
  VARIANT (1)..(16): Xaa = Any Amino Acid
CCXEWCCNPACTGXXC

SEQ ID NO: 4093 - protein, 17 aa, Artificial Sequence
  Synthetically generated peptide
  VARIANT (1)..(17): Xaa = Any Amino Acid
CCXEWCCNPACTGXXXC

SEQ ID NO: 4094 - protein, 14 aa, Artificial Sequence
  Synthetically generated peptide
  VARIANT (1)..(14): Xaa = Any Amino Acid
CCEXWCCNPACTGC

SEQ ID NO: 4095 - protein, 15 aa, Artificial Sequence
  Synthetically generated peptide
  VARIANT (1)..(15): Xaa = Any Amino Acid
CCEXXWCCNPACTGC

SEQ ID NO: 4096 - protein, 16 aa, Artificial Sequence
  Synthetically generated peptide
  VARIANT (1)..(16): Xaa = Any Amino Acid
CCEXXXWCCNPACTGC

SEQ ID NO: 4097 - protein, 17 aa, Artificial Sequence
  Synthetically generated peptide
  VARIANT (1)..(17): Xaa = Any Amino Acid
CCEXXXXWCCNPACTGC

SEQ ID NO: 4098 - protein, 17 aa, Artificial Sequence
  Synthetically generated peptide
  VARIANT (1)..(17): Xaa = Any Amino Acid
CCEXXXWXCCNPACTGC

SEQ ID NO: 4099 - protein, 17 aa, Artificial Sequence
  Synthetically generated peptide
  VARIANT (1)..(17): Xaa = Any Amino Acid
CCEXXXWCCXNPACTGC

SEQ ID NO: 4100 - protein, 17 aa, Artificial Sequence
  Synthetically generated peptide
  VARIANT (1)..(17): Xaa = Any Amino Acid
CCEXXXWCCNXPACTGC

SEQ ID NO: 4101 - protein, 17 aa, Artificial Sequence
  Synthetically generated peptide
  VARIANT (1)..(17): Xaa = Any Amino Acid
CCEXXXWCCNPXACTGC

SEQ ID NO: 4102 - protein, 17 aa, Artificial Sequence
  Synthetically generated peptide
  VARIANT (1)..(17): Xaa = Any Amino Acid
CCEXXXWCCNPAXCTGC

SEQ ID NO: 4103 - protein, 17 aa, Artificial Sequence
  Synthetically generated peptide
  VARIANT (1)..(17): Xaa = Any Amino Acid
CCEXXXWCCNPACXTGC

SEQ ID NO: 4104 - protein, 17 aa, Artificial Sequence
  Synthetically generated peptide
  VARIANT (1)..(17): Xaa = Any Amino Acid
CCEXXXWCCNPACTXGC

SEQ ID NO: 4105 - protein, 17 aa, Artificial Sequence
  Synthetically generated peptide
  VARIANT (1)..(17): Xaa = Any Amino Acid
CCEXXXWCCNPACTGXC

SEQ ID NO: 4106 - protein, 16 aa, Artificial Sequence
  Synthetically generated peptide
  VARIANT (1)..(16): Xaa = Any Amino Acid
CCEXXWXCCNPACTGC

SEQ ID NO: 4107 - protein, 17 aa, Artificial Sequence
  Synthetically generated peptide
  VARIANT (1)..(17): Xaa = Any Amino Acid
CCEXXWXXCCNPACTGC

SEQ ID NO: 4108 - protein, 17 aa, Artificial Sequence
  Synthetically generated peptide
  VARIANT (1)..(17): Xaa = Any Amino Acid
CCEXXWXCCXNPACTGC

SEQ ID NO: 4109 - protein, 17 aa, Artificial Sequence
  Synthetically generated peptide
  VARIANT (1)..(17): Xaa = Any Amino Acid
CCEXXWXCCNXPACTGC

SEQ ID NO: 4110 - protein, 17 aa, Artificial Sequence
  Synthetically generated peptide
  VARIANT (1)..(17): Xaa = Any Amino Acid
CCEXXWXCCNPXACTGC

SEQ ID NO: 4111 - protein, 17 aa, Artificial Sequence
  Synthetically generated peptide
  VARIANT (1)..(17): Xaa = Any Amino Acid
CCEXXWXCCNPAXCTGC

SEQ ID NO: 4112 - protein, 17 aa, Artificial Sequence
  Synthetically generated peptide
  VARIANT (1)..(17): Xaa = Any Amino Acid
CCEXXWXCCNPACXTGC

SEQ ID NO: 4113 - protein, 17 aa, Artificial Sequence
  Synthetically generated peptide
  VARIANT (1)..(17): Xaa = Any Amino Acid
CCEXXWXCCNPACTXGC

SEQ ID NO: 4114 - protein, 17 aa, Artificial Sequence
  Synthetically generated peptide
  VARIANT (1)..(17): Xaa = Any Amino Acid
CCEXXWXCCNPACTGXC

SEQ ID NO: 4115 - protein, 16 aa, Artificial Sequence
  Synthetically generated peptide
  VARIANT (1)..(16): Xaa = Any Amino Acid
CCEXXWCCXNPACTGC

SEQ ID NO: 4116 - protein, 17 aa, Artificial Sequence
  Synthetically generated peptide
  VARIANT (1)..(17): Xaa = Any Amino Acid
CCEXXWCCXXNPACTGC

SEQ ID NO: 4117 - protein, 17 aa, Artificial Sequence
  Synthetically generated peptide
  VARIANT (1)..(17): Xaa = Any Amino Acid
CCEXXWCCXNXPACTGC

SEQ ID NO: 4118 - protein, 17 aa, Artificial Sequence
  Synthetically generated peptide
  VARIANT (1)..(17): Xaa = Any Amino Acid
CCEXXWCCXNPXACTGC

SEQ ID NO: 4119 - protein, 17 aa, Artificial Sequence
  Synthetically generated peptide
  VARIANT (1)..(17): Xaa = Any Amino Acid
CCEXXWCCXNPAXCTGC

SEQ ID NO: 4120 - protein, 17 aa, Artificial Sequence
  Synthetically generated peptide
  VARIANT (1)..(17): Xaa = Any Amino Acid
CCEXXWCCXNPACXTGC

SEQ ID NO: 4121 - protein, 17 aa, Artificial Sequence
  Synthetically generated peptide
  VARIANT (1)..(17): Xaa = Any Amino Acid
CCEXXWCCXNPACTXGC

SEQ ID NO: 4122 - protein, 17 aa, Artificial Sequence
  Synthetically generated peptide
  VARIANT (1)..(17): Xaa = Any Amino Acid
CCEXXWCCXNPACTGXC

SEQ ID NO: 4123 - protein, 16 aa, Artificial Sequence
  Synthetically generated peptide
  VARIANT (1)..(16): Xaa = Any Amino Acid
CCEXXWCCNXPACTGC

SEQ ID NO: 4124 - protein, 17 aa, Artificial Sequence
  Synthetically generated peptide
  VARIANT (1)..(17): Xaa = Any Amino Acid
CCEXXWCCNXXPACTGC

SEQ ID NO: 4125 - protein, 17 aa, Artificial Sequence
  Synthetically generated peptide
  VARIANT (1)..(17): Xaa = Any Amino Acid
CCEXXWCCNXPXACTGC

SEQ ID NO: 4126 - protein, 17 aa, Artificial Sequence
  Synthetically generated peptide
  VARIANT (1)..(17): Xaa = Any Amino Acid
CCEXXWCCNXPAXCTGC

SEQ ID NO: 4127 - protein, 17 aa, Artificial Sequence
  Synthetically generated peptide
  VARIANT (1)..(17): Xaa = Any Amino Acid
CCEXXWCCNXPACXTGC

SEQ ID NO: 4128 - protein, 17 aa, Artificial Sequence
  Synthetically generated peptide
  VARIANT (1)..(17): Xaa = Any Amino Acid
CCEXXWCCNXPACTXGC

SEQ ID NO: 4129 - protein, 17 aa, Artificial Sequence
  Synthetically generated peptide
  VARIANT (1)..(17): Xaa = Any Amino Acid
CCEXXWCCNXPACTGXC

SEQ ID NO: 4130 - protein, 16 aa, Artificial Sequence
  Synthetically generated peptide
  VARIANT (1)..(16): Xaa = Any Amino Acid
CCEXXWCCNPXACTGC

SEQ ID NO: 4131 - protein, 17 aa, Artificial Sequence
  Synthetically generated peptide
  VARIANT (1)..(17): Xaa = Any Amino Acid
CCEXXWCCNPXXACTGC

SEQ ID NO: 4132 - protein, 17 aa, Artificial Sequence
  Synthetically generated peptide
  VARIANT (1)..(17): Xaa = Any Amino Acid
CCEXXWCCNPXAXCTGC

SEQ ID NO: 4133 - protein, 17 aa, Artificial Sequence
  Synthetically generated peptide
  VARIANT (1)..(17): Xaa = Any Amino Acid
CCEXXWCCNPXACXTGC

SEQ ID NO: 4134 - protein, 17 aa, Artificial Sequence
  Synthetically generated peptide
  VARIANT (1)..(17): Xaa = Any Amino Acid
CCEXXWCCNPXACTXGC

SEQ ID NO: 4135 - protein, 17 aa, Artificial Sequence
  Synthetically generated peptide
  VARIANT (1)..(17): Xaa = Any Amino Acid
CCEXXWCCNPXACTGXC

SEQ ID NO: 4136 - protein, 16 aa, Artificial Sequence
  Synthetically generated peptide
  VARIANT (1)..(16): Xaa = Any Amino Acid
CCEXXWCCNPAXCTGC

SEQ ID NO: 4137 - protein, 17 aa, Artificial Sequence
  Synthetically generated peptide
  VARIANT (1)..(17): Xaa = Any Amino Acid
CCEXXWCCNPAXXCTGC

SEQ ID NO: 4138 - protein, 17 aa, Artificial Sequence
  Synthetically generated peptide
  VARIANT (1)..(17): Xaa = Any Amino Acid
CCEXXWCCNPAXCXTGC

SEQ ID NO: 4139 - protein, 17 aa, Artificial Sequence
  Synthetically generated peptide
  VARIANT (1)..(17): Xaa = Any Amino Acid
CCEXXWCCNPAXCTXGC

SEQ ID NO: 4140 - protein, 17 aa, Artificial Sequence
  Synthetically generated peptide
  VARIANT (1)..(17): Xaa = Any Amino Acid
CCEXXWCCNPAXCTGXC

SEQ ID NO: 4141 - protein, 16 aa, Artificial Sequence
  Synthetically generated peptide
  VARIANT (1)..(16): Xaa = Any Amino Acid
CCEXXWCCNPACXTGC

SEQ ID NO: 4142 - protein, 17 aa, Artificial Sequence
  Synthetically generated peptide
  VARIANT (1)..(17): Xaa = Any Amino Acid
CCEXXWCCNPACXXTGC

SEQ ID NO: 4143 - protein, 17 aa, Artificial Sequence
  Synthetically generated peptide
  VARIANT (1)..(17): Xaa = Any Amino Acid
CCEXXWCCNPACXTXGC

SEQ ID NO: 4144 - protein, 17 aa, Artificial Sequence
  Synthetically generated peptide
  VARIANT (1)..(17): Xaa = Any Amino Acid
CCEXXWCCNPACXTGXC

SEQ ID NO: 4145 - protein, 16 aa, Artificial Sequence
  Synthetically generated peptide
  VARIANT (1)..(16): Xaa = Any Amino Acid
CCEXXWCCNPACTXGC

SEQ ID NO: 4146 - protein, 17 aa, Artificial Sequence
  Synthetically generated peptide
  VARIANT (1)..(17): Xaa = Any Amino Acid
CCEXXWCCNPACTXXGC

SEQ ID NO: 4147 - protein, 17 aa, Artificial Sequence
  Synthetically generated peptide
  VARIANT (1)..(17): Xaa = Any Amino Acid
CCEXXWCCNPACTXGXC

SEQ ID NO: 4148 - protein, 16 aa, Artificial Sequence
  Synthetically generated peptide
  VARIANT (1)..(16): Xaa = Any Amino Acid
CCEXXWCCNPACTGXC

SEQ ID NO: 4149 - protein, 17 aa, Artificial Sequence
  Synthetically generated peptide
  VARIANT (1)..(17): Xaa = Any Amino Acid
CCEXXWCCNPACTGXXC

SEQ ID NO: 4150 - protein, 15 aa, Artificial Sequence
  Synthetically generated peptide
  VARIANT (1)..(15): Xaa = Any Amino Acid
CCEXWXCCNPACTGC

SEQ ID NO: 4151 - protein, 16 aa, Artificial Sequence
  Synthetically generated peptide
  VARIANT (1)..(16): Xaa = Any Amino Acid
CCEXWXXCCNPACTGC

SEQ ID NO: 4152 - protein, 17 aa, Artificial Sequence
  Synthetically generated peptide
  VARIANT (1)..(17): Xaa = Any Amino Acid
CCEXWXXXCCNPACTGC

SEQ ID NO: 4153 - protein, 17 aa, Artificial Sequence
  Synthetically generated peptide
  VARIANT (1)..(17): Xaa = Any Amino Acid
CCEXWXXCCXNPACTGC

SEQ ID NO: 4154 - protein, 17 aa, Artificial Sequence
  Synthetically generated peptide
  VARIANT (1)..(17): Xaa = Any Amino Acid
CCEXWXXCCNXPACTGC

SEQ ID NO: 4155 - protein, 17 aa, Artificial Sequence
  Synthetically generated peptide
  VARIANT (1)..(17): Xaa = Any Amino Acid
CCEXWXXCCNPXACTGC

SEQ ID NO: 4156 - protein, 17 aa, Artificial Sequence
  Synthetically generated peptide
  VARIANT (1)..(17): Xaa = Any Amino Acid
CCEXWXXCCNPAXCTGC

SEQ ID NO: 4157 - protein, 17 aa, Artificial Sequence
  Synthetically generated peptide
  VARIANT (1)..(17): Xaa = Any Amino Acid
CCEXWXXCCNPACXTGC

SEQ ID NO: 4158 - protein, 17 aa, Artificial Sequence
  Synthetically generated peptide
  VARIANT (1)..(17): Xaa = Any Amino Acid
CCEXWXXCCNPACTXGC

SEQ ID NO: 4159 - protein, 17 aa, Artificial Sequence
  Synthetically generated peptide
  VARIANT (1)..(17): Xaa = Any Amino Acid
CCEXWXXCCNPACTGXC

SEQ ID NO: 4160 - protein, 16 aa, Artificial Sequence
  Synthetically generated peptide
  VARIANT (1)..(16): Xaa = Any Amino Acid
CCEXWXCCXNPACTGC

SEQ ID NO: 4161 - protein, 17 aa, Artificial Sequence
  Synthetically generated peptide
  VARIANT (1)..(17): Xaa = Any Amino Acid
CCEXWXCCXXNPACTGC

SEQ ID NO: 4162 - protein, 17 aa, Artificial Sequence
  Synthetically generated peptide
  VARIANT (1)..(17): Xaa = Any Amino Acid
CCEXWXCCXNXPACTGC

SEQ ID NO: 4163 - protein, 17 aa, Artificial Sequence
  Synthetically generated peptide
  VARIANT (1)..(17): Xaa = Any Amino Acid
CCEXWXCCXNPXACTGC

SEQ ID NO: 4164 - protein, 17 aa, Artificial Sequence
  Synthetically generated peptide
  VARIANT (1)..(17): Xaa = Any Amino Acid
CCEXWXCCXNPAXCTGC

SEQ ID NO: 4165 - protein, 17 aa, Artificial Sequence
  Synthetically generated peptide
  VARIANT (1)..(17): Xaa = Any Amino Acid
CCEXWXCCXNPACXTGC

SEQ ID NO: 4166 - protein, 17 aa, Artificial Sequence
  Synthetically generated peptide
  VARIANT (1)..(17): Xaa = Any Amino Acid
CCEXWXCCXNPACTXGC

SEQ ID NO: 4167 - protein, 17 aa, Artificial Sequence
  Synthetically generated peptide
  VARIANT (1)..(17): Xaa = Any Amino Acid
CCEXWXCCXNPACTGXC

SEQ ID NO: 4168 - protein, 16 aa, Artificial Sequence
  Synthetically generated peptide
  VARIANT (1)..(16): Xaa = Any Amino Acid
CCEXWXCCNXPACTGC

SEQ ID NO: 4169 - protein, 17 aa, Artificial Sequence
  Synthetically generated peptide
  VARIANT (1)..(17): Xaa = Any Amino Acid
CCEXWXCCNXXPACTGC

SEQ ID NO: 4170 - protein, 17 aa, Artificial Sequence
  Synthetically generated peptide
  VARIANT (1)..(17): Xaa = Any Amino Acid
CCEXWXCCNXPXACTGC

SEQ ID NO: 4171 - protein, 17 aa, Artificial Sequence
  Synthetically generated peptide
  VARIANT (1)..(17): Xaa = Any Amino Acid
CCEXWXCCNXPAXCTGC

SEQ ID NO: 4172 - protein, 17 aa, Artificial Sequence
  Synthetically generated peptide
  VARIANT (1)..(17): Xaa = Any Amino Acid
CCEXWXCCNXPACXTGC

SEQ ID NO: 4173 - protein, 17 aa, Artificial Sequence
  Synthetically generated peptide
  VARIANT (1)..(17): Xaa = Any Amino Acid
CCEXWXCCNXPACTXGC

SEQ ID NO: 4174 - protein, 17 aa, Artificial Sequence
  Synthetically generated peptide
  VARIANT (1)..(17): Xaa = Any Amino Acid
CCEXWXCCNXPACTGXC

SEQ ID NO: 4175 - protein, 16 aa, Artificial Sequence
  Synthetically generated peptide
  VARIANT (1)..(16): Xaa = Any Amino Acid
CCEXWXCCNPXACTGC

SEQ ID NO: 4176 - protein, 17 aa, Artificial Sequence
  Synthetically generated peptide
  VARIANT (1)..(17): Xaa = Any Amino Acid
CCEXWXCCNPXXACTGC

SEQ ID NO: 4177 - protein, 17 aa, Artificial Sequence
  Synthetically generated peptide
  VARIANT (1)..(17): Xaa = Any Amino Acid
CCEXWXCCNPXAXCTGC

SEQ ID NO: 4178 - protein, 17 aa, Artificial Sequence
  Synthetically generated peptide
  VARIANT (1)..(17): Xaa = Any Amino Acid
CCEXWXCCNPXACXTGC

SEQ ID NO: 4179 - protein, 17 aa, Artificial Sequence
  Synthetically generated peptide
  VARIANT (1)..(17): Xaa = Any Amino Acid
CCEXWXCCNPXACTXGC

SEQ ID NO: 4180 - protein, 17 aa, Artificial Sequence
  Synthetically generated peptide
  VARIANT (1)..(17): Xaa = Any Amino Acid
CCEXWXCCNPXACTGXC

SEQ ID NO: 4181 - protein, 16 aa, Artificial Sequence
  Synthetically generated peptide
  VARIANT (1)..(16): Xaa = Any Amino Acid
CCEXWXCCNPAXCTGC

SEQ ID NO: 4182 - protein, 17 aa, Artificial Sequence
  Synthetically generated peptide
  VARIANT (1)..(17): Xaa = Any Amino Acid
CCEXWXCCNPAXXCTGC

SEQ ID NO: 4183 - protein, 17 aa, Artificial Sequence
  Synthetically generated peptide
  VARIANT (1)..(17): Xaa = Any Amino Acid
CCEXWXCCNPAXCXTGC

SEQ ID NO: 4184 - protein, 17 aa, Artificial Sequence
  Synthetically generated peptide
  VARIANT (1)..(17): Xaa = Any Amino Acid
CCEXWXCCNPAXCTXGC

SEQ ID NO: 4185 - protein, 17 aa, Artificial Sequence
  Synthetically generated peptide
  VARIANT (1)..(17): Xaa = Any Amino Acid
CCEXWXCCNPAXCTGXC

SEQ ID NO: 4186 - protein, 16 aa, Artificial Sequence
  Synthetically generated peptide
  VARIANT (1)..(16): Xaa = Any Amino Acid
CCEXWXCCNPACXTGC

SEQ ID NO: 4187 - protein, 17 aa, Artificial Sequence
  Synthetically generated peptide
  VARIANT (1)..(17): Xaa = Any Amino Acid
CCEXWXCCNPACXXTGC

SEQ ID NO: 4188 - protein, 17 aa, Artificial Sequence
  Synthetically generated peptide
  VARIANT (1)..(17): Xaa = Any Amino Acid
CCEXWXCCNPACXTXGC

SEQ ID NO: 4189 - protein, 17 aa, Artificial Sequence
  Synthetically generated peptide
  VARIANT (1)..(17): Xaa = Any Amino Acid
CCEXWXCCNPACXTGXC

SEQ ID NO: 4190 - protein, 16 aa, Artificial Sequence
  Synthetically generated peptide
  VARIANT (1)..(16): Xaa = Any Amino Acid
CCEXWXCCNPACTXGC

SEQ ID NO: 4191 - protein, 17 aa, Artificial Sequence
  Synthetically generated peptide
  VARIANT (1)..(17): Xaa = Any Amino Acid
CCEXWXCCNPACTXXGC

SEQ ID NO: 4192 - protein, 17 aa, Artificial Sequence
  Synthetically generated peptide
  VARIANT (1)..(17): Xaa = Any Amino Acid
CCEXWXCCNPACTXGXC

SEQ ID NO: 4193 - protein, 16 aa, Artificial Sequence
  Synthetically generated peptide
  VARIANT (1)..(16): Xaa = Any Amino Acid
CCEXWXCCNPACTGXC

SEQ ID NO: 4194 - protein, 17 aa, Artificial Sequence
  Synthetically generated peptide
  VARIANT (1)..(17): Xaa = Any Amino Acid
CCEXWXCCNPACTGXXC

SEQ ID NO: 4195 - protein, 15 aa, Artificial Sequence
  Synthetically generated peptide
  VARIANT (1)..(15): Xaa = Any Amino Acid
CCEXWCCXNPACTGC

SEQ ID NO: 4196 - protein, 16 aa, Artificial Sequence
  Synthetically generated peptide
  VARIANT (1)..(16): Xaa = Any Amino Acid
CCEXWCCXXNPACTGC

SEQ ID NO: 4197 - protein, 17 aa, Artificial Sequence
  Synthetically generated peptide
  VARIANT (1)..(17): Xaa = Any Amino Acid
CCEXWCCXXXNPACTGC

SEQ ID NO: 4198 - protein, 17 aa, Artificial Sequence
  Synthetically generated peptide
  VARIANT (1)..(17): Xaa = Any Amino Acid
CCEXWCCXXNXPACTGC

SEQ ID NO: 4199 - protein, 17 aa, Artificial Sequence
  Synthetically generated peptide
  VARIANT (1)..(17): Xaa = Any Amino Acid
CCEXWCCXXNPXACTGC

SEQ ID NO: 4200 - protein, 17 aa, Artificial Sequence
  Synthetically generated peptide
  VARIANT (1)..(17): Xaa = Any Amino Acid
CCEXWCCXXNPAXCTGC

SEQ ID NO: 4201 - protein, 17 aa, Artificial Sequence
  Synthetically generated peptide
  VARIANT (1)..(17): Xaa = Any Amino Acid
CCEXWCCXXNPACXTGC

SEQ ID NO: 4202 - protein, 17 aa, Artificial Sequence
  Synthetically generated peptide
  VARIANT (1)..(17): Xaa = Any Amino Acid
CCEXWCCXXNPACTXGC

SEQ ID NO: 4203 - protein, 17 aa, Artificial Sequence
  Synthetically generated peptide
  VARIANT (1)..(17): Xaa = Any Amino Acid
CCEXWCCXXNPACTGXC

SEQ ID NO: 4204 - protein, 16 aa, Artificial Sequence
  Synthetically generated peptide
  VARIANT (1)..(16): Xaa = Any Amino Acid
CCEXWCCXNXPACTGC

SEQ ID NO: 4205 - protein, 17 aa, Artificial Sequence
  Synthetically generated peptide
  VARIANT (1)..(17): Xaa = Any Amino Acid
CCEXWCCXNXXPACTGC

SEQ ID NO: 4206 - protein, 17 aa, Artificial Sequence
  Synthetically generated peptide
  VARIANT (1)..(17): Xaa = Any Amino Acid
CCEXWCCXNXPXACTGC

SEQ ID NO: 4207 - protein, 17 aa, Artificial Sequence
  Synthetically generated peptide
  VARIANT (1)..(17): Xaa = Any Amino Acid
CCEXWCCXNXPAXCTGC

SEQ ID NO: 4208 - protein, 17 aa, Artificial Sequence
  Synthetically generated peptide
  VARIANT (1)..(17): Xaa = Any Amino Acid
CCEXWCCXNXPACXTGC

SEQ ID NO: 4209 - protein, 17 aa, Artificial Sequence
  Synthetically generated peptide
  VARIANT (1)..(17): Xaa = Any Amino Acid
CCEXWCCXNXPACTXGC

SEQ ID NO: 4210 - protein, 17 aa, Artificial Sequence
  Synthetically generated peptide
  VARIANT (1)..(17): Xaa = Any Amino Acid
CCEXWCCXNXPACTGXC

SEQ ID NO: 4211 - protein, 16 aa, Artificial Sequence
  Synthetically generated peptide
  VARIANT (1)..(16): Xaa = Any Amino Acid
CCEXWCCXNPXACTGC

SEQ ID NO: 4212 - protein, 17 aa, Artificial Sequence
  Synthetically generated peptide
  VARIANT (1)..(17): Xaa = Any Amino Acid
CCEXWCCXNPXXACTGC

SEQ ID NO: 4213 - protein, 17 aa, Artificial Sequence
  Synthetically generated peptide
  VARIANT (1)..(17): Xaa = Any Amino Acid
CCEXWCCXNPXAXCTGC

SEQ ID NO: 4214 - protein, 17 aa, Artificial Sequence
  Synthetically generated peptide
  VARIANT (1)..(17): Xaa = Any Amino Acid
CCEXWCCXNPXACXTGC

SEQ ID NO: 4215 - protein, 17 aa, Artificial Sequence
  Synthetically generated peptide
  VARIANT (1)..(17): Xaa = Any Amino Acid
CCEXWCCXNPXACTXGC

SEQ ID NO: 4216 - protein, 17 aa, Artificial Sequence
  Synthetically generated peptide
  VARIANT (1)..(17): Xaa = Any Amino Acid
CCEXWCCXNPXACTGXC

SEQ ID NO: 4217 - protein, 16 aa, Artificial Sequence
  Synthetically generated peptide
  VARIANT (1)..(16): Xaa = Any Amino Acid
CCEXWCCXNPAXCTGC

SEQ ID NO: 4218 - protein, 17 aa, Artificial Sequence
  Synthetically generated peptide
  VARIANT (1)..(17): Xaa = Any Amino Acid
CCEXWCCXNPAXXCTGC

SEQ ID NO: 4219 - protein, 17 aa, Artificial Sequence
  Synthetically generated peptide
  VARIANT (1)..(17): Xaa = Any Amino Acid
CCEXWCCXNPAXCXTGC

SEQ ID NO: 4220 - protein, 17 aa, Artificial Sequence
  Synthetically generated peptide
  VARIANT (1)..(17): Xaa = Any Amino Acid
CCEXWCCXNPAXCTXGC

SEQ ID NO: 4221 - protein, 17 aa, Artificial Sequence
  Synthetically generated peptide
  VARIANT (1)..(17): Xaa = Any Amino Acid
CCEXWCCXNPAXCTGXC

SEQ ID NO: 4222 - protein, 16 aa, Artificial Sequence
  Synthetically generated peptide
  VARIANT (1)..(16): Xaa = Any Amino Acid
CCEXWCCXNPACXTGC

SEQ ID NO: 4223 - protein, 17 aa, Artificial Sequence
  Synthetically generated peptide
  VARIANT (1)..(17): Xaa = Any Amino Acid
CCEXWCCXNPACXXTGC

SEQ ID NO: 4224 - protein, 17 aa, Artificial Sequence
  Synthetically generated peptide
  VARIANT (1)..(17): Xaa = Any Amino Acid
CCEXWCCXNPACXTXGC

SEQ ID NO: 4225 - protein, 17 aa, Artificial Sequence
  Synthetically generated peptide
  VARIANT (1)..(17): Xaa = Any Amino Acid
CCEXWCCXNPACXTGXC

SEQ ID NO: 4226 - protein, 16 aa, Artificial Sequence
  Synthetically generated peptide
  VARIANT (1)..(16): Xaa = Any Amino Acid
CCEXWCCXNPACTXGC

SEQ ID NO: 4227 - protein, 17 aa, Artificial Sequence
  Synthetically generated peptide
  VARIANT (1)..(17): Xaa = Any Amino Acid
CCEXWCCXNPACTXXGC

SEQ ID NO: 4228 - protein, 17 aa, Artificial Sequence
  Synthetically generated peptide
  VARIANT (1)..(17): Xaa = Any Amino Acid
CCEXWCCXNPACTXGXC

SEQ ID NO: 4229 - protein, 16 aa, Artificial Sequence
  Synthetically generated peptide
  VARIANT (1)..(16): Xaa = Any Amino Acid
CCEXWCCXNPACTGXC

SEQ ID NO: 4230 - protein, 17 aa, Artificial Sequence
  Synthetically generated peptide
  VARIANT (1)..(17): Xaa = Any Amino Acid
CCEXWCCXNPACTGXXC

SEQ ID NO: 4231 - protein, 15 aa, Artificial Sequence
  Synthetically generated peptide
  VARIANT (1)..(15): Xaa = Any Amino Acid
CCEXWCCNXPACTGC

SEQ ID NO: 4232 - protein, 16 aa, Artificial Sequence
  Synthetically generated peptide
  VARIANT (1)..(16): Xaa = Any Amino Acid
CCEXWCCNXXPACTGC

SEQ ID NO: 4233 - protein, 17 aa, Artificial Sequence
  Synthetically generated peptide
  VARIANT (1)..(17): Xaa = Any Amino Acid
CCEXWCCNXXXPACTGC

SEQ ID NO: 4234 - protein, 17 aa, Artificial Sequence
  Synthetically generated peptide
  VARIANT (1)..(17): Xaa = Any Amino Acid
CCEXWCCNXXPXACTGC

SEQ ID NO: 4235 - protein, 17 aa, Artificial Sequence
  Synthetically generated peptide
  VARIANT (1)..(17): Xaa = Any Amino Acid
CCEXWCCNXXPAXCTGC

SEQ ID NO: 4236 - protein, 17 aa, Artificial Sequence
  Synthetically generated peptide
  VARIANT (1)..(17): Xaa = Any Amino Acid
CCEXWCCNXXPACXTGC

SEQ ID NO: 4237 - protein, 17 aa, Artificial Sequence
  Synthetically generated peptide
  VARIANT (1)..(17): Xaa = Any Amino Acid
CCEXWCCNXXPACTXGC

SEQ ID NO: 4238 - protein, 17 aa, Artificial Sequence
  Synthetically generated peptide
  VARIANT (1)..(17): Xaa = Any Amino Acid
CCEXWCCNXXPACTGXC

SEQ ID NO: 4239 - protein, 16 aa, Artificial Sequence
  Synthetically generated peptide
  VARIANT (1)..(16): Xaa = Any Amino Acid
CCEXWCCNXPXACTGC

SEQ ID NO: 4240 - protein, 17 aa, Artificial Sequence
  Synthetically generated peptide
  VARIANT (1)..(17): Xaa = Any Amino Acid
CCEXWCCNXPXXACTGC

SEQ ID NO: 4241 - protein, 17 aa, Artificial Sequence
  Synthetically generated peptide
  VARIANT (1)..(17): Xaa = Any Amino Acid
CCEXWCCNXPXAXCTGC

SEQ ID NO: 4242 - protein, 17 aa, Artificial Sequence
  Synthetically generated peptide
  VARIANT (1)..(17): Xaa = Any Amino Acid
CCEXWCCNXPXACXTGC

SEQ ID NO: 4243 - protein, 17 aa, Artificial Sequence
  Synthetically generated peptide
  VARIANT (1)..(17): Xaa = Any Amino Acid
CCEXWCCNXPXACTXGC

SEQ ID NO: 4244 - protein, 17 aa, Artificial Sequence
  Synthetically generated peptide
  VARIANT (1)..(17): Xaa = Any Amino Acid
CCEXWCCNXPXACTGXC

SEQ ID NO: 4245 - protein, 16 aa, Artificial Sequence
  Synthetically generated peptide
  VARIANT (1)..(16): Xaa = Any Amino Acid
CCEXWCCNXPAXCTGC

SEQ ID NO: 4246 - protein, 17 aa, Artificial Sequence
  Synthetically generated peptide
  VARIANT (1)..(17): Xaa = Any Amino Acid
CCEXWCCNXPAXXCTGC

SEQ ID NO: 4247 - protein, 17 aa, Artificial Sequence
  Synthetically generated peptide
  VARIANT (1)..(17): Xaa = Any Amino Acid
CCEXWCCNXPAXCXTGC

SEQ ID NO: 4248 - protein, 17 aa, Artificial Sequence
  Synthetically generated peptide
  VARIANT (1)..(17): Xaa = Any Amino Acid
CCEXWCCNXPAXCTXGC

SEQ ID NO: 4249 - protein, 17 aa, Artificial Sequence
  Synthetically generated peptide
  VARIANT (1)..(17): Xaa = Any Amino Acid
CCEXWCCNXPAXCTGXC

SEQ ID NO: 4250 - protein, 16 aa, Artificial Sequence
  Synthetically generated peptide
  VARIANT (1)..(16): Xaa = Any Amino Acid
CCEXWCCNXPACXTGC

SEQ ID NO: 4251 - protein, 17 aa, Artificial Sequence
  Synthetically generated peptide
  VARIANT (1)..(17): Xaa = Any Amino Acid
CCEXWCCNXPACXXTGC

SEQ ID NO: 4252 - protein, 17 aa, Artificial Sequence
  Synthetically generated peptide
  VARIANT (1)..(17): Xaa = Any Amino Acid
CCEXWCCNXPACXTXGC

SEQ ID NO: 4253 - protein, 17 aa, Artificial Sequence
  Synthetically generated peptide
  VARIANT (1)..(17): Xaa = Any Amino Acid
CCEXWCCNXPACXTGXC

SEQ ID NO: 4254 - protein, 16 aa, Artificial Sequence
  Synthetically generated peptide
  VARIANT (1)..(16): Xaa = Any Amino Acid
CCEXWCCNXPACTXGC

SEQ ID NO: 4255 - protein, 17 aa, Artificial Sequence
  Synthetically generated peptide
  VARIANT (1)..(17): Xaa = Any Amino Acid
CCEXWCCNXPACTXXGC

SEQ ID NO: 4256 - protein, 17 aa, Artificial Sequence
  Synthetically generated peptide
  VARIANT (1)..(17): Xaa = Any Amino Acid
CCEXWCCNXPACTXGXC

SEQ ID NO: 4257 - protein, 16 aa, Artificial Sequence
  Synthetically generated peptide
  VARIANT (1)..(16): Xaa = Any Amino Acid
CCEXWCCNXPACTGXC

SEQ ID NO: 4258 - protein, 17 aa, Artificial Sequence
  Synthetically generated peptide
  VARIANT (1)..(17): Xaa = Any Amino Acid
CCEXWCCNXPACTGXXC

SEQ ID NO: 4259 - protein, 15 aa, Artificial Sequence
  Synthetically generated peptide
  VARIANT (1)..(15): Xaa = Any Amino Acid
CCEXWCCNPXACTGC

SEQ ID NO: 4260 - protein, 16 aa, Artificial Sequence
  Synthetically generated peptide
  VARIANT (1)..(16): Xaa = Any Amino Acid
CCEXWCCNPXXACTGC

SEQ ID NO: 4261 - protein, 17 aa, Artificial Sequence
  Synthetically generated peptide
  VARIANT (1)..(17): Xaa = Any Amino Acid
CCEXWCCNPXXXACTGC

SEQ ID NO: 4262 - protein, 17 aa, Artificial Sequence
  Synthetically generated peptide
  VARIANT (1)..(17): Xaa = Any Amino Acid
CCEXWCCNPXXAXCTGC

SEQ ID NO: 4263 - protein, 17 aa, Artificial Sequence
  Synthetically generated peptide
  VARIANT (1)..(17): Xaa = Any Amino Acid
CCEXWCCNPXXACXTGC

SEQ ID NO: 4264 - protein, 17 aa, Artificial Sequence
  Synthetically generated peptide
  VARIANT (1)..(17): Xaa = Any Amino Acid
CCEXWCCNPXXACTXGC

SEQ ID NO: 4265 - protein, 17 aa, Artificial Sequence
  Synthetically generated peptide
  VARIANT (1)..(17): Xaa = Any Amino Acid
CCEXWCCNPXXACTGXC

SEQ ID NO: 4266 - protein, 16 aa, Artificial Sequence
  Synthetically generated peptide
  VARIANT (1)..(16): Xaa = Any Amino Acid
CCEXWCCNPXAXCTGC

SEQ ID NO: 4267 - protein, 17 aa, Artificial Sequence
  Synthetically generated peptide
  VARIANT (1)..(17): Xaa = Any Amino Acid
CCEXWCCNPXAXXCTGC

SEQ ID NO: 4268 - protein, 17 aa, Artificial Sequence
  Synthetically generated peptide
  VARIANT (1)..(17): Xaa = Any Amino Acid
CCEXWCCNPXAXCXTGC

SEQ ID NO: 4269 - protein, 17 aa, Artificial Sequence
  Synthetically generated peptide
  VARIANT (1)..(17): Xaa = Any Amino Acid
CCEXWCCNPXAXCTXGC

SEQ ID NO: 4270 - protein, 17 aa, Artificial Sequence
  Synthetically generated peptide
  VARIANT (1)..(17): Xaa = Any Amino Acid
CCEXWCCNPXAXCTGXC

SEQ ID NO: 4271 - protein, 16 aa, Artificial Sequence
  Synthetically generated peptide
  VARIANT (1)..(16): Xaa = Any Amino Acid
CCEXWCCNPXACXTGC

SEQ ID NO: 4272 - protein, 17 aa, Artificial Sequence
  Synthetically generated peptide
  VARIANT (1)..(17): Xaa = Any Amino Acid
CCEXWCCNPXACXXTGC

SEQ ID NO: 4273 - protein, 17 aa, Artificial Sequence
  Synthetically generated peptide
  VARIANT (1)..(17): Xaa = Any Amino Acid
CCEXWCCNPXACXTXGC

SEQ ID NO: 4274 - protein, 17 aa, Artificial Sequence
  Synthetically generated peptide
  VARIANT (1)..(17): Xaa = Any Amino Acid
CCEXWCCNPXACXTGXC

SEQ ID NO: 4275 - protein, 16 aa, Artificial Sequence
  Synthetically generated peptide
  VARIANT (1)..(16): Xaa = Any Amino Acid
CCEXWCCNPXACTXGC

SEQ ID NO: 4276 - protein, 17 aa, Artificial Sequence
  Synthetically generated peptide
  VARIANT (1)..(17): Xaa = Any Amino Acid
CCEXWCCNPXACTXXGC

SEQ ID NO: 4277 - protein, 17 aa, Artificial Sequence
  Synthetically generated peptide
  VARIANT (1)..(17): Xaa = Any Amino Acid
CCEXWCCNPXACTXGXC

SEQ ID NO: 4278 - protein, 16 aa, Artificial Sequence
  Synthetically generated peptide
  VARIANT (1)..(16): Xaa = Any Amino Acid
CCEXWCCNPXACTGXC

SEQ ID NO: 4279 - protein, 17 aa, Artificial Sequence
  Synthetically generated peptide
  VARIANT (1)..(17): Xaa = Any Amino Acid
CCEXWCCNPXACTGXXC

SEQ ID NO: 4280 - protein, 15 aa, Artificial Sequence
  Synthetically generated peptide
  VARIANT (1)..(15): Xaa = Any Amino Acid
CCEXWCCNPAXCTGC

SEQ ID NO: 4281 - protein, 16 aa, Artificial Sequence
  Synthetically generated peptide
  VARIANT (1)..(16): Xaa = Any Amino Acid
CCEXWCCNPAXXCTGC

SEQ ID NO: 4282 - protein, 17 aa, Artificial Sequence
  Synthetically generated peptide
  VARIANT (1)..(17): Xaa = Any Amino Acid
CCEXWCCNPAXXXCTGC

SEQ ID NO: 4283 - protein, 17 aa, Artificial Sequence
  Synthetically generated peptide
  VARIANT (1)..(17): Xaa = Any Amino Acid
CCEXWCCNPAXXCXTGC

SEQ ID NO: 4284 - protein, 17 aa, Artificial Sequence
  Synthetically generated peptide
  VARIANT (1)..(17): Xaa = Any Amino Acid
CCEXWCCNPAXXCTXGC

SEQ ID NO: 4285 - protein, 17 aa, Artificial Sequence
  Synthetically generated peptide
  VARIANT (1)..(17): Xaa = Any Amino Acid
CCEXWCCNPAXXCTGXC

SEQ ID NO: 4286 - protein, 16 aa, Artificial Sequence
  Synthetically generated peptide
  VARIANT (1)..(16): Xaa = Any Amino Acid
CCEXWCCNPAXCXTGC

SEQ ID NO: 4287 - protein, 17 aa, Artificial Sequence
  Synthetically generated peptide
  VARIANT (1)..(17): Xaa = Any Amino Acid
CCEXWCCNPAXCXXTGC

SEQ ID NO: 4288 - protein, 17 aa, Artificial Sequence
  Synthetically generated peptide
  VARIANT (1)..(17): Xaa = Any Amino Acid
CCEXWCCNPAXCXTXGC

SEQ ID NO: 4289 - protein, 17 aa, Artificial Sequence
  Synthetically generated peptide
  VARIANT (1)..(17): Xaa = Any Amino Acid
CCEXWCCNPAXCXTGXC

SEQ ID NO: 4290 - protein, 16 aa, Artificial Sequence
  Synthetically generated peptide
  VARIANT (1)..(16): Xaa = Any Amino Acid
CCEXWCCNPAXCTXGC

SEQ ID NO: 4291 - protein, 17 aa, Artificial Sequence
  Synthetically generated peptide
  VARIANT (1)..(17): Xaa = Any Amino Acid
CCEXWCCNPAXCTXXGC

SEQ ID NO: 4292 - protein, 17 aa, Artificial Sequence
  Synthetically generated peptide
  VARIANT (1)..(17): Xaa = Any Amino Acid
CCEXWCCNPAXCTXGXC

SEQ ID NO: 4293 - protein, 16 aa, Artificial Sequence
  Synthetically generated peptide
  VARIANT (1)..(16): Xaa = Any Amino Acid
CCEXWCCNPAXCTGXC

SEQ ID NO: 4294 - protein, 17 aa, Artificial Sequence
  Synthetically generated peptide
  VARIANT (1)..(17): Xaa = Any Amino Acid
CCEXWCCNPAXCTGXXC

SEQ ID NO: 4295 - protein, 15 aa, Artificial Sequence
  Synthetically generated peptide
  VARIANT (1)..(15): Xaa = Any Amino Acid
CCEXWCCNPACXTGC

SEQ ID NO: 4296 - protein, 16 aa, Artificial Sequence
  Synthetically generated peptide
  VARIANT (1)..(16): Xaa = Any Amino Acid
CCEXWCCNPACXXTGC

SEQ ID NO: 4297 - protein, 17 aa, Artificial Sequence
  Synthetically generated peptide
  VARIANT (1)..(17): Xaa = Any Amino Acid
CCEXWCCNPACXXXTGC

SEQ ID NO: 4298 - protein, 17 aa, Artificial Sequence
  Synthetically generated peptide
  VARIANT (1)..(17): Xaa = Any Amino Acid
CCEXWCCNPACXXTXGC

SEQ ID NO: 4299 - protein, 17 aa, Artificial Sequence
  Synthetically generated peptide
  VARIANT (1)..(17): Xaa = Any Amino Acid
CCEXWCCNPACXXTGXC

SEQ ID NO: 4300 - protein, 16 aa, Artificial Sequence
  Synthetically generated peptide
  VARIANT (1)..(16): Xaa = Any Amino Acid
CCEXWCCNPACXTXGC

SEQ ID NO: 4301 - protein, 17 aa, Artificial Sequence
  Synthetically generated peptide
  VARIANT (1)..(17): Xaa = Any Amino Acid
CCEXWCCNPACXTXXGC

SEQ ID NO: 4302 - protein, 17 aa, Artificial Sequence
  Synthetically generated peptide
  VARIANT (1)..(17): Xaa = Any Amino Acid
CCEXWCCNPACXTXGXC

SEQ ID NO: 4303 - protein, 16 aa, Artificial Sequence
  Synthetically generated peptide
  VARIANT (1)..(16): Xaa = Any Amino Acid
CCEXWCCNPACXTGXC

SEQ ID NO: 4304 - protein, 17 aa, Artificial Sequence
  Synthetically generated peptide
  VARIANT (1)..(17): Xaa = Any Amino Acid
CCEXWCCNPACXTGXXC

SEQ ID NO: 4305 - protein, 15 aa, Artificial Sequence
  Synthetically generated peptide
  VARIANT (1)..(15): Xaa = Any Amino Acid
CCEXWCCNPACTXGC

SEQ ID NO: 4306 - protein, 16 aa, Artificial Sequence
  Synthetically generated peptide
  VARIANT (1)..(16): Xaa = Any Amino Acid
CCEXWCCNPACTXXGC

SEQ ID NO: 4307 - protein, 17 aa, Artificial Sequence
  Synthetically generated peptide
  VARIANT (1)..(17): Xaa = Any Amino Acid
CCEXWCCNPACTXXXGC

SEQ ID NO: 4308 - protein, 17 aa, Artificial Sequence
  Synthetically generated peptide
  VARIANT (1)..(17): Xaa = Any Amino Acid
CCEXWCCNPACTXXGXC

SEQ ID NO: 4309 - protein, 16 aa, Artificial Sequence
  Synthetically generated peptide
  VARIANT (1)..(16): Xaa = Any Amino Acid
CCEXWCCNPACTXGXC

SEQ ID NO: 4310 - protein, 17 aa, Artificial Sequence
  Synthetically generated peptide
  VARIANT (1)..(17): Xaa = Any Amino Acid
CCEXWCCNPACTXGXXC

SEQ ID NO: 4311 - protein, 15 aa, Artificial Sequence
  Synthetically generated peptide
  VARIANT (1)..(15): Xaa = Any Amino Acid
CCEXWCCNPACTGXC

SEQ ID NO: 4312 - protein, 16 aa, Artificial Sequence
  Synthetically generated peptide
  VARIANT (1)..(16): Xaa = Any Amino Acid
CCEXWCCNPACTGXXC

SEQ ID NO: 4313 - protein, 17 aa, Artificial Sequence
  Synthetically generated peptide
  VARIANT (1)..(17): Xaa = Any Amino Acid
CCEXWCCNPACTGXXXC

SEQ ID NO: 4314 - protein, 14 aa, Artificial Sequence
  Synthetically generated peptide
  VARIANT (1)..(14): Xaa = Any Amino Acid
CCEWXCCNPACTGC

SEQ ID NO: 4315 - protein, 15 aa, Artificial Sequence
  Synthetically generated peptide
  VARIANT (1)..(15): Xaa = Any Amino Acid
CCEWXXCCNPACTGC

SEQ ID NO: 4316 - protein, 16 aa, Artificial Sequence
  Synthetically generated peptide
  VARIANT (1)..(16): Xaa = Any Amino Acid
CCEWXXXCCNPACTGC

SEQ ID NO: 4317 - protein, 17 aa, Artificial Sequence
  Synthetically generated peptide
  VARIANT (1)..(17): Xaa = Any Amino Acid
CCEWXXXXCCNPACTGC

SEQ ID NO: 4318 - protein, 17 aa, Artificial Sequence
  Synthetically generated peptide
  VARIANT (1)..(17): Xaa = Any Amino Acid
CCEWXXXCCXNPACTGC

SEQ ID NO: 4319 - protein, 17 aa, Artificial Sequence
  Synthetically generated peptide
  VARIANT (1)..(17): Xaa = Any Amino Acid
CCEWXXXCCNXPACTGC

SEQ ID NO: 4320 - protein, 17 aa, Artificial Sequence
  Synthetically generated peptide
  VARIANT (1)..(17): Xaa = Any Amino Acid
CCEWXXXCCNPXACTGC

SEQ ID NO: 4321 - protein, 17 aa, Artificial Sequence
  Synthetically generated peptide
  VARIANT (1)..(17): Xaa = Any Amino Acid
CCEWXXXCCNPAXCTGC

SEQ ID NO: 4322 - protein, 17 aa, Artificial Sequence
  Synthetically generated peptide
  VARIANT (1)..(17): Xaa = Any Amino Acid
CCEWXXXCCNPACXTGC

SEQ ID NO: 4323 - protein, 17 aa, Artificial Sequence
  Synthetically generated peptide
  VARIANT (1)..(17): Xaa = Any Amino Acid
CCEWXXXCCNPACTXGC

SEQ ID NO: 4324 - protein, 17 aa, Artificial Sequence
  Synthetically generated peptide
  VARIANT (1)..(17): Xaa = Any Amino Acid
CCEWXXXCCNPACTGXC

SEQ ID NO: 4325 - protein, 16 aa, Artificial Sequence
  Synthetically generated peptide
  VARIANT (1)..(16): Xaa = Any Amino Acid
CCEWXXCCXNPACTGC

SEQ ID NO: 4326 - protein, 17 aa, Artificial Sequence
  Synthetically generated peptide
  VARIANT (1)..(17): Xaa = Any Amino Acid
CCEWXXCCXXNPACTGC

SEQ ID NO: 4327 - protein, 17 aa, Artificial Sequence
  Synthetically generated peptide
  VARIANT (1)..(17): Xaa = Any Amino Acid
CCEWXXCCXNXPACTGC

SEQ ID NO: 4328 - protein, 17 aa, Artificial Sequence
  Synthetically generated peptide
  VARIANT (1)..(17): Xaa = Any Amino Acid
CCEWXXCCXNPXACTGC

SEQ ID NO: 4329 - protein, 17 aa, Artificial Sequence
  Synthetically generated peptide
  VARIANT (1)..(17): Xaa = Any Amino Acid
CCEWXXCCXNPAXCTGC

SEQ ID NO: 4330 - protein, 17 aa, Artificial Sequence
  Synthetically generated peptide
  VARIANT (1)..(17): Xaa = Any Amino Acid
CCEWXXCCXNPACXTGC

SEQ ID NO: 4331 - protein, 17 aa, Artificial Sequence
  Synthetically generated peptide
  VARIANT (1)..(17): Xaa = Any Amino Acid
CCEWXXCCXNPACTXGC

SEQ ID NO: 4332 - protein, 17 aa, Artificial Sequence
  Synthetically generated peptide
  VARIANT (1)..(17): Xaa = Any Amino Acid
CCEWXXCCXNPACTGXC

SEQ ID NO: 4333 - protein, 16 aa, Artificial Sequence
  Synthetically generated peptide
  VARIANT (1)..(16): Xaa = Any Amino Acid
CCEWXXCCNXPACTGC

SEQ ID NO: 4334 - protein, 17 aa, Artificial Sequence
  Synthetically generated peptide
  VARIANT (1)..(17): Xaa = Any Amino Acid
CCEWXXCCNXXPACTGC

SEQ ID NO: 4335 - protein, 17 aa, Artificial Sequence
  Synthetically generated peptide
  VARIANT (1)..(17): Xaa = Any Amino Acid
CCEWXXCCNXPXACTGC

SEQ ID NO: 4336 - protein, 17 aa, Artificial Sequence
  Synthetically generated peptide
  VARIANT (1)..(17): Xaa = Any Amino Acid
CCEWXXCCNXPAXCTGC

SEQ ID NO: 4337 - protein, 17 aa, Artificial Sequence
  Synthetically generated peptide
  VARIANT (1)..(17): Xaa = Any Amino Acid
CCEWXXCCNXPACXTGC

SEQ ID NO: 4338 - protein, 17 aa, Artificial Sequence
  Synthetically generated peptide
  VARIANT (1)..(17): Xaa = Any Amino Acid
CCEWXXCCNXPACTXGC

SEQ ID NO: 4339 - protein, 17 aa, Artificial Sequence
  Synthetically generated peptide
  VARIANT (1)..(17): Xaa = Any Amino Acid
CCEWXXCCNXPACTGXC

SEQ ID NO: 4340 - protein, 16 aa, Artificial Sequence
  Synthetically generated peptide
  VARIANT (1)..(16): Xaa = Any Amino Acid
CCEWXXCCNPXACTGC

SEQ ID NO: 4341 - protein, 17 aa, Artificial Sequence
  Synthetically generated peptide
  VARIANT (1)..(17): Xaa = Any Amino Acid
CCEWXXCCNPXXACTGC

SEQ ID NO: 4342 - protein, 17 aa, Artificial Sequence
  Synthetically generated peptide
  VARIANT (1)..(17): Xaa = Any Amino Acid
CCEWXXCCNPXAXCTGC

SEQ ID NO: 4343 - protein, 17 aa, Artificial Sequence
  Synthetically generated peptide
  VARIANT (1)..(17): Xaa = Any Amino Acid
CCEWXXCCNPXACXTGC

SEQ ID NO: 4344 - protein, 17 aa, Artificial Sequence
  Synthetically generated peptide
  VARIANT (1)..(17): Xaa = Any Amino Acid
CCEWXXCCNPXACTXGC

SEQ ID NO: 4345 - protein, 17 aa, Artificial Sequence
  Synthetically generated peptide
  VARIANT (1)..(17): Xaa = Any Amino Acid
CCEWXXCCNPXACTGXC

SEQ ID NO: 4346 - protein, 16 aa, Artificial Sequence
  Synthetically generated peptide
  VARIANT (1)..(16): Xaa = Any Amino Acid
CCEWXXCCNPAXCTGC

SEQ ID NO: 4347 - protein, 17 aa, Artificial Sequence
  Synthetically generated peptide
  VARIANT (1)..(17): Xaa = Any Amino Acid
CCEWXXCCNPAXXCTGC

SEQ ID NO: 4348 - protein, 17 aa, Artificial Sequence
  Synthetically generated peptide
  VARIANT (1)..(17): Xaa = Any Amino Acid
CCEWXXCCNPAXCXTGC

SEQ ID NO: 4349 - protein, 17 aa, Artificial Sequence
  Synthetically generated peptide
  VARIANT (1)..(17): Xaa = Any Amino Acid
CCEWXXCCNPAXCTXGC

SEQ ID NO: 4350 - protein, 17 aa, Artificial Sequence
  Synthetically generated peptide
  VARIANT (1)..(17): Xaa = Any Amino Acid
CCEWXXCCNPAXCTGXC

SEQ ID NO: 4351 - protein, 16 aa, Artificial Sequence
  Synthetically generated peptide
  VARIANT (1)..(16): Xaa = Any Amino Acid
CCEWXXCCNPACXTGC

SEQ ID NO: 4352 - protein, 17 aa, Artificial Sequence
  Synthetically generated peptide
  VARIANT (1)..(17): Xaa = Any Amino Acid
CCEWXXCCNPACXXTGC

SEQ ID NO: 4353 - protein, 17 aa, Artificial Sequence
  Synthetically generated peptide
  VARIANT (1)..(17): Xaa = Any Amino Acid
CCEWXXCCNPACXTXGC

SEQ ID NO: 4354 - protein, 17 aa, Artificial Sequence
  Synthetically generated peptide
  VARIANT (1)..(17): Xaa = Any Amino Acid
CCEWXXCCNPACXTGXC

SEQ ID NO: 4355 - protein, 16 aa, Artificial Sequence
  Synthetically generated peptide
  VARIANT (1)..(16): Xaa = Any Amino Acid
CCEWXXCCNPACTXGC

SEQ ID NO: 4356 - protein, 17 aa, Artificial Sequence
  Synthetically generated peptide
  VARIANT (1)..(17): Xaa = Any Amino Acid
CCEWXXCCNPACTXXGC

SEQ ID NO: 4357 - protein, 17 aa, Artificial Sequence
  Synthetically generated peptide
  VARIANT (1)..(17): Xaa = Any Amino Acid
CCEWXXCCNPACTXGXC

SEQ ID NO: 4358 - protein, 16 aa, Artificial Sequence
  Synthetically generated peptide
  VARIANT (1)..(16): Xaa = Any Amino Acid
CCEWXXCCNPACTGXC

SEQ ID NO: 4359 - protein, 17 aa, Artificial Sequence
  Synthetically generated peptide
  VARIANT (1)..(17): Xaa = Any Amino Acid
CCEWXXCCNPACTGXXC

SEQ ID NO: 4360 - protein, 15 aa, Artificial Sequence
  Synthetically generated peptide
  VARIANT (1)..(15): Xaa = Any Amino Acid
CCEWXCCXNPACTGC

SEQ ID NO: 4361 - protein, 16 aa, Artificial Sequence
  Synthetically generated peptide
  VARIANT (1)..(16): Xaa = Any Amino Acid
CCEWXCCXXNPACTGC

SEQ ID NO: 4362 - protein, 17 aa, Artificial Sequence
  Synthetically generated peptide
  VARIANT (1)..(17): Xaa = Any Amino Acid
CCEWXCCXXXNPACTGC

SEQ ID NO: 4363 - protein, 17 aa, Artificial Sequence
  Synthetically generated peptide
  VARIANT (1)..(17): Xaa = Any Amino Acid
CCEWXCCXXNXPACTGC

SEQ ID NO: 4364 - protein, 17 aa, Artificial Sequence
  Synthetically generated peptide
  VARIANT (1)..(17): Xaa = Any Amino Acid
CCEWXCCXXNPXACTGC

SEQ ID NO: 4365 - protein, 17 aa, Artificial Sequence
  Synthetically generated peptide
  VARIANT (1)..(17): Xaa = Any Amino Acid
CCEWXCCXXNPAXCTGC

SEQ ID NO: 4366 - protein, 17 aa, Artificial Sequence
  Synthetically generated peptide
  VARIANT (1)..(17): Xaa = Any Amino Acid
CCEWXCCXXNPACXTGC

SEQ ID NO: 4367 - protein, 17 aa, Artificial Sequence
  Synthetically generated peptide
  VARIANT (1)..(17): Xaa = Any Amino Acid
CCEWXCCXXNPACTXGC

SEQ ID NO: 4368 - protein, 17 aa, Artificial Sequence
  Synthetically generated peptide
  VARIANT (1)..(17): Xaa = Any Amino Acid
CCEWXCCXXNPACTGXC

SEQ ID NO: 4369 - protein, 16 aa, Artificial Sequence
  Synthetically generated peptide
  VARIANT (1)..(16): Xaa = Any Amino Acid
CCEWXCCXNXPACTGC

SEQ ID NO: 4370 - protein, 17 aa, Artificial Sequence
  Synthetically generated peptide
  VARIANT (1)..(17): Xaa = Any Amino Acid
CCEWXCCXNXXPACTGC

SEQ ID NO: 4371 - protein, 17 aa, Artificial Sequence
  Synthetically generated peptide
  VARIANT (1)..(17): Xaa = Any Amino Acid
CCEWXCCXNXPXACTGC

SEQ ID NO: 4372 - protein, 17 aa, Artificial Sequence
  Synthetically generated peptide
  VARIANT (1)..(17): Xaa = Any Amino Acid
CCEWXCCXNXPAXCTGC

SEQ ID NO: 4373 - protein, 17 aa, Artificial Sequence
  Synthetically generated peptide
  VARIANT (1)..(17): Xaa = Any Amino Acid
CCEWXCCXNXPACXTGC

SEQ ID NO: 4374 - protein, 17 aa, Artificial Sequence
  Synthetically generated peptide
  VARIANT (1)..(17): Xaa = Any Amino Acid
CCEWXCCXNXPACTXGC

SEQ ID NO: 4375 - protein, 17 aa, Artificial Sequence
  Synthetically generated peptide
  VARIANT (1)..(17): Xaa = Any Amino Acid
CCEWXCCXNXPACTGXC

SEQ ID NO: 4376 - protein, 16 aa, Artificial Sequence
  Synthetically generated peptide
  VARIANT (1)..(16): Xaa = Any Amino Acid
CCEWXCCXNPXACTGC

SEQ ID NO: 4377 - protein, 17 aa, Artificial Sequence
  Synthetically generated peptide
  VARIANT (1)..(17): Xaa = Any Amino Acid
CCEWXCCXNPXXACTGC

SEQ ID NO: 4378 - protein, 17 aa, Artificial Sequence
  Synthetically generated peptide
  VARIANT (1)..(17): Xaa = Any Amino Acid
CCEWXCCXNPXAXCTGC

SEQ ID NO: 4379 - protein, 17 aa, Artificial Sequence
  Synthetically generated peptide
  VARIANT (1)..(17): Xaa = Any Amino Acid
CCEWXCCXNPXACXTGC

SEQ ID NO: 4380 - protein, 17 aa, Artificial Sequence
  Synthetically generated peptide
  VARIANT (1)..(17): Xaa = Any Amino Acid
CCEWXCCXNPXACTXGC

SEQ ID NO: 4381 - protein, 17 aa, Artificial Sequence
  Synthetically generated peptide
  VARIANT (1)..(17): Xaa = Any Amino Acid
CCEWXCCXNPXACTGXC

SEQ ID NO: 4382 - protein, 16 aa, Artificial Sequence
  Synthetically generated peptide
  VARIANT (1)..(16): Xaa = Any Amino Acid
CCEWXCCXNPAXCTGC

SEQ ID NO: 4383 - protein, 17 aa, Artificial Sequence
  Synthetically generated peptide
  VARIANT (1)..(17): Xaa = Any Amino Acid
CCEWXCCXNPAXXCTGC

SEQ ID NO: 4384 - protein, 17 aa, Artificial Sequence
  Synthetically generated peptide
  VARIANT (1)..(17): Xaa = Any Amino Acid
CCEWXCCXNPAXCXTGC

SEQ ID NO: 4385 - protein, 17 aa, Artificial Sequence
  Synthetically generated peptide
  VARIANT (1)..(17): Xaa = Any Amino Acid
CCEWXCCXNPAXCTXGC

SEQ ID NO: 4386 - protein, 17 aa, Artificial Sequence
  Synthetically generated peptide
  VARIANT (1)..(17): Xaa = Any Amino Acid
CCEWXCCXNPAXCTGXC

SEQ ID NO: 4387 - protein, 16 aa, Artificial Sequence
  Synthetically generated peptide
  VARIANT (1)..(16): Xaa = Any Amino Acid
CCEWXCCXNPACXTGC

SEQ ID NO: 4388 - protein, 17 aa, Artificial Sequence
  Synthetically generated peptide
  VARIANT (1)..(17): Xaa = Any Amino Acid
CCEWXCCXNPACXXTGC

SEQ ID NO: 4389 - protein, 17 aa, Artificial Sequence
  Synthetically generated peptide
  VARIANT (1)..(17): Xaa = Any Amino Acid
CCEWXCCXNPACXTXGC

SEQ ID NO: 4390 - protein, 17 aa, Artificial Sequence
  Synthetically generated peptide
  VARIANT (1)..(17): Xaa = Any Amino Acid
CCEWXCCXNPACXTGXC

SEQ ID NO: 4391 - protein, 16 aa, Artificial Sequence
  Synthetically generated peptide
  VARIANT (1)..(16): Xaa = Any Amino Acid
CCEWXCCXNPACTXGC

SEQ ID NO: 4392 - protein, 17 aa, Artificial Sequence
  Synthetically generated peptide
  VARIANT (1)..(17): Xaa = Any Amino Acid
CCEWXCCXNPACTXXGC

SEQ ID NO: 4393 - protein, 17 aa, Artificial Sequence
  Synthetically generated peptide
  VARIANT (1)..(17): Xaa = Any Amino Acid
CCEWXCCXNPACTXGXC

SEQ ID NO: 4394 - protein, 16 aa, Artificial Sequence
  Synthetically generated peptide
  VARIANT (1)..(16): Xaa = Any Amino Acid
CCEWXCCXNPACTGXC

SEQ ID NO: 4395 - protein, 17 aa, Artificial Sequence
  Synthetically generated peptide
  VARIANT (1)..(17): Xaa = Any Amino Acid
CCEWXCCXNPACTGXXC

SEQ ID NO: 4396 - protein, 15 aa, Artificial Sequence
  Synthetically generated peptide
  VARIANT (1)..(15): Xaa = Any Amino Acid
CCEWXCCNXPACTGC

SEQ ID NO: 4397 - protein, 16 aa, Artificial Sequence
  Synthetically generated peptide
  VARIANT (1)..(16): Xaa = Any Amino Acid
CCEWXCCNXXPACTGC

SEQ ID NO: 4398 - protein, 17 aa, Artificial Sequence
  Synthetically generated peptide
  VARIANT (1)..(17): Xaa = Any Amino Acid
CCEWXCCNXXXPACTGC

SEQ ID NO: 4399 - protein, 17 aa, Artificial Sequence
  Synthetically generated peptide
  VARIANT (1)..(17): Xaa = Any Amino Acid
CCEWXCCNXXPXACTGC

SEQ ID NO: 4400 - protein, 17 aa, Artificial Sequence
  Synthetically generated peptide
  VARIANT (1)..(17): Xaa = Any Amino Acid
CCEWXCCNXXPAXCTGC

SEQ ID NO: 4401 - protein, 17 aa, Artificial Sequence
  Synthetically generated peptide
  VARIANT (1)..(17): Xaa = Any Amino Acid
CCEWXCCNXXPACXTGC

SEQ ID NO: 4402 - protein, 17 aa, Artificial Sequence
  Synthetically generated peptide
  VARIANT (1)..(17): Xaa = Any Amino Acid
CCEWXCCNXXPACTXGC

SEQ ID NO: 4403 - protein, 17 aa, Artificial Sequence
  Synthetically generated peptide
  VARIANT (1)..(17): Xaa = Any Amino Acid
CCEWXCCNXXPACTGXC

SEQ ID NO: 4404 - protein, 16 aa, Artificial Sequence
  Synthetically generated peptide
  VARIANT (1)..(16): Xaa = Any Amino Acid
CCEWXCCNXPXACTGC

SEQ ID NO: 4405 - protein, 17 aa, Artificial Sequence
  Synthetically generated peptide
  VARIANT (1)..(17): Xaa = Any Amino Acid
CCEWXCCNXPXXACTGC

SEQ ID NO: 4406 - protein, 17 aa, Artificial Sequence
  Synthetically generated peptide
  VARIANT (1)..(17): Xaa = Any Amino Acid
CCEWXCCNXPXAXCTGC

SEQ ID NO: 4407 - protein, 17 aa, Artificial Sequence
  Synthetically generated peptide
  VARIANT (1)..(17): Xaa = Any Amino Acid
CCEWXCCNXPXACXTGC

SEQ ID NO: 4408 - protein, 17 aa, Artificial Sequence
  Synthetically generated peptide
  VARIANT (1)..(17): Xaa = Any Amino Acid
CCEWXCCNXPXACTXGC

SEQ ID NO: 4409 - protein, 17 aa, Artificial Sequence
  Synthetically generated peptide
  VARIANT (1)..(17): Xaa = Any Amino Acid
CCEWXCCNXPXACTGXC

SEQ ID NO: 4410 - protein, 16 aa, Artificial Sequence
  Synthetically generated peptide
  VARIANT (1)..(16): Xaa = Any Amino Acid
CCEWXCCNXPAXCTGC

SEQ ID NO: 4411 - protein, 17 aa, Artificial Sequence
  Synthetically generated peptide
  VARIANT (1)..(17): Xaa = Any Amino Acid
CCEWXCCNXPAXXCTGC

SEQ ID NO: 4412 - protein, 17 aa, Artificial Sequence
  Synthetically generated peptide
  VARIANT (1)..(17): Xaa = Any Amino Acid
CCEWXCCNXPAXCXTGC

SEQ ID NO: 4413 - protein, 17 aa, Artificial Sequence
  Synthetically generated peptide
  VARIANT (1)..(17): Xaa = Any Amino Acid
CCEWXCCNXPAXCTXGC

SEQ ID NO: 4414 - protein, 17 aa, Artificial Sequence
  Synthetically generated peptide
  VARIANT (1)..(17): Xaa = Any Amino Acid
CCEWXCCNXPAXCTGXC

SEQ ID NO: 4415 - protein, 16 aa, Artificial Sequence
  Synthetically generated peptide
  VARIANT (1)..(16): Xaa = Any Amino Acid
CCEWXCCNXPACXTGC

SEQ ID NO: 4416 - protein, 17 aa, Artificial Sequence
  Synthetically generated peptide
  VARIANT (1)..(17): Xaa = Any Amino Acid
CCEWXCCNXPACXXTGC

SEQ ID NO: 4417 - protein, 17 aa, Artificial Sequence
  Synthetically generated peptide
  VARIANT (1)..(17): Xaa = Any Amino Acid
CCEWXCCNXPACXTXGC

SEQ ID NO: 4418 - protein, 17 aa, Artificial Sequence
  Synthetically generated peptide
  VARIANT (1)..(17): Xaa = Any Amino Acid
CCEWXCCNXPACXTGXC

SEQ ID NO: 4419 - protein, 16 aa, Artificial Sequence
  Synthetically generated peptide
  VARIANT (1)..(16): Xaa = Any Amino Acid
CCEWXCCNXPACTXGC

SEQ ID NO: 4420 - protein, 17 aa, Artificial Sequence
  Synthetically generated peptide
  VARIANT (1)..(17): Xaa = Any Amino Acid
CCEWXCCNXPACTXXGC

SEQ ID NO: 4421 - protein, 17 aa, Artificial Sequence
  Synthetically generated peptide
  VARIANT (1)..(17): Xaa = Any Amino Acid
CCEWXCCNXPACTXGXC

SEQ ID NO: 4422 - protein, 16 aa, Artificial Sequence
  Synthetically generated peptide
  VARIANT (1)..(16): Xaa = Any Amino Acid
CCEWXCCNXPACTGXC

SEQ ID NO: 4423 - protein, 17 aa, Artificial Sequence
  Synthetically generated peptide
  VARIANT (1)..(17): Xaa = Any Amino Acid
CCEWXCCNXPACTGXXC

SEQ ID NO: 4424 - protein, 15 aa, Artificial Sequence
  Synthetically generated peptide
  VARIANT (1)..(15): Xaa = Any Amino Acid
CCEWXCCNPXACTGC

SEQ ID NO: 4425 - protein, 16 aa, Artificial Sequence
  Synthetically generated peptide
  VARIANT (1)..(16): Xaa = Any Amino Acid
CCEWXCCNPXXACTGC

SEQ ID NO: 4426 - protein, 17 aa, Artificial Sequence
  Synthetically generated peptide
  VARIANT (1)..(17): Xaa = Any Amino Acid
CCEWXCCNPXXXACTGC

SEQ ID NO: 4427 - protein, 17 aa, Artificial Sequence
  Synthetically generated peptide
  VARIANT (1)..(17): Xaa = Any Amino Acid
CCEWXCCNPXXAXCTGC

SEQ ID NO: 4428 - protein, 17 aa, Artificial Sequence
  Synthetically generated peptide
  VARIANT (1)..(17): Xaa = Any Amino Acid
CCEWXCCNPXXACXTGC

SEQ ID NO: 4429 - protein, 17 aa, Artificial Sequence
  Synthetically generated peptide
  VARIANT (1)..(17): Xaa = Any Amino Acid
CCEWXCCNPXXACTXGC

SEQ ID NO: 4430 - protein, 17 aa, Artificial Sequence
  Synthetically generated peptide
  VARIANT (1)..(17): Xaa = Any Amino Acid
CCEWXCCNPXXACTGXC

SEQ ID NO: 4431 - protein, 16 aa, Artificial Sequence
  Synthetically generated peptide
  VARIANT (1)..(16): Xaa = Any Amino Acid
CCEWXCCNPXAXCTGC

SEQ ID NO: 4432 - protein, 17 aa, Artificial Sequence
  Synthetically generated peptide
  VARIANT (1)..(17): Xaa = Any Amino Acid
CCEWXCCNPXAXXCTGC

SEQ ID NO: 4433 - protein, 17 aa, Artificial Sequence
  Synthetically generated peptide
  VARIANT (1)..(17): Xaa = Any Amino Acid
CCEWXCCNPXAXCXTGC

SEQ ID NO: 4434 - protein, 17 aa, Artificial Sequence
  Synthetically generated peptide
  VARIANT (1)..(17): Xaa = Any Amino Acid
CCEWXCCNPXAXCTXGC

SEQ ID NO: 4435 - protein, 17 aa, Artificial Sequence
  Synthetically generated peptide
  VARIANT (1)..(17): Xaa = Any Amino Acid
CCEWXCCNPXAXCTGXC

SEQ ID NO: 4436 - protein, 16 aa, Artificial Sequence
  Synthetically generated peptide
  VARIANT (1)..(16): Xaa = Any Amino Acid
CCEWXCCNPXACXTGC

SEQ ID NO: 4437 - protein, 17 aa, Artificial Sequence
  Synthetically generated peptide
  VARIANT (1)..(17): Xaa = Any Amino Acid
CCEWXCCNPXACXXTGC

SEQ ID NO: 4438 - protein, 17 aa, Artificial Sequence
  Synthetically generated peptide
  VARIANT (1)..(17): Xaa = Any Amino Acid
CCEWXCCNPXACXTXGC

SEQ ID NO: 4439 - protein, 17 aa, Artificial Sequence
  Synthetically generated peptide
  VARIANT (1)..(17): Xaa = Any Amino Acid
CCEWXCCNPXACXTGXC

SEQ ID NO: 4440 - protein, 16 aa, Artificial Sequence
  Synthetically generated peptide
  VARIANT (1)..(16): Xaa = Any Amino Acid
CCEWXCCNPXACTXGC

SEQ ID NO: 4441 - protein, 17 aa, Artificial Sequence
  Synthetically generated peptide
  VARIANT (1)..(17): Xaa = Any Amino Acid
CCEWXCCNPXACTXXGC

SEQ ID NO: 4442 - protein, 17 aa, Artificial Sequence
  Synthetically generated peptide
  VARIANT (1)..(17): Xaa = Any Amino Acid
CCEWXCCNPXACTXGXC

SEQ ID NO: 4443 - protein, 16 aa, Artificial Sequence
  Synthetically generated peptide
  VARIANT (1)..(16): Xaa = Any Amino Acid
CCEWXCCNPXACTGXC

SEQ ID NO: 4444 - protein, 17 aa, Artificial Sequence
  Synthetically generated peptide
  VARIANT (1)..(17): Xaa = Any Amino Acid
CCEWXCCNPXACTGXXC

SEQ ID NO: 4445 - protein, 15 aa, Artificial Sequence
  Synthetically generated peptide
  VARIANT (1)..(15): Xaa = Any Amino Acid
CCEWXCCNPAXCTGC

SEQ ID NO: 4446 - protein, 16 aa, Artificial Sequence
  Synthetically generated peptide
  VARIANT (1)..(16): Xaa = Any Amino Acid
CCEWXCCNPAXXCTGC

SEQ ID NO: 4447 - protein, 17 aa, Artificial Sequence
  Synthetically generated peptide
  VARIANT (1)..(17): Xaa = Any Amino Acid
CCEWXCCNPAXXXCTGC

SEQ ID NO: 4448 - protein, 17 aa, Artificial Sequence
  Synthetically generated peptide
  VARIANT (1)..(17): Xaa = Any Amino Acid
CCEWXCCNPAXXCXTGC

SEQ ID NO: 4449 - protein, 17 aa, Artificial Sequence
  Synthetically generated peptide
  VARIANT (1)..(17): Xaa = Any Amino Acid
CCEWXCCNPAXXCTXGC

SEQ ID NO: 4450 - protein, 17 aa, Artificial Sequence
  Synthetically generated peptide
  VARIANT (1)..(17): Xaa = Any Amino Acid
CCEWXCCNPAXXCTGXC

SEQ ID NO: 4451 - protein, 16 aa, Artificial Sequence
  Synthetically generated peptide
  VARIANT (1)..(16): Xaa = Any Amino Acid
CCEWXCCNPAXCXTGC

SEQ ID NO: 4452 - protein, 17 aa, Artificial Sequence
  Synthetically generated peptide
  VARIANT (1)..(17): Xaa = Any Amino Acid
CCEWXCCNPAXCXXTGC

SEQ ID NO: 4453 - protein, 17 aa, Artificial Sequence
  Synthetically generated peptide
  VARIANT (1)..(17): Xaa = Any Amino Acid
CCEWXCCNPAXCXTXGC

SEQ ID NO: 4454 - protein, 17 aa, Artificial Sequence
  Synthetically generated peptide
  VARIANT (1)..(17): Xaa = Any Amino Acid
CCEWXCCNPAXCXTGXC

SEQ ID NO: 4455 - protein, 16 aa, Artificial Sequence
  Synthetically generated peptide
  VARIANT (1)..(16): Xaa = Any Amino Acid
CCEWXCCNPAXCTXGC

SEQ ID NO: 4456 - protein, 17 aa, Artificial Sequence
  Synthetically generated peptide
  VARIANT (1)..(17): Xaa = Any Amino Acid
CCEWXCCNPAXCTXXGC

SEQ ID NO: 4457 - protein, 17 aa, Artificial Sequence
  Synthetically generated peptide
  VARIANT (1)..(17): Xaa = Any Amino Acid
CCEWXCCNPAXCTXGXC

SEQ ID NO: 4458 - protein, 16 aa, Artificial Sequence
  Synthetically generated peptide
  VARIANT (1)..(16): Xaa = Any Amino Acid
CCEWXCCNPAXCTGXC

SEQ ID NO: 4459 - protein, 17 aa, Artificial Sequence
  Synthetically generated peptide
  VARIANT (1)..(17): Xaa = Any Amino Acid
CCEWXCCNPAXCTGXXC

SEQ ID NO: 4460 - protein, 15 aa, Artificial Sequence
  Synthetically generated peptide
  VARIANT (1)..(15): Xaa = Any Amino Acid
CCEWXCCNPACXTGC

SEQ ID NO: 4461 - protein, 16 aa, Artificial Sequence
  Synthetically generated peptide
  VARIANT (1)..(16): Xaa = Any Amino Acid
CCEWXCCNPACXXTGC

SEQ ID NO: 4462 - protein, 17 aa, Artificial Sequence
  Synthetically generated peptide
  VARIANT (1)..(17): Xaa = Any Amino Acid
CCEWXCCNPACXXXTGC

SEQ ID NO: 4463 - protein, 17 aa, Artificial Sequence
  Synthetically generated peptide
  VARIANT (1)..(17): Xaa = Any Amino Acid
CCEWXCCNPACXXTXGC

SEQ ID NO: 4464 - protein, 17 aa, Artificial Sequence
  Synthetically generated peptide
  VARIANT (1)..(17): Xaa = Any Amino Acid
CCEWXCCNPACXXTGXC

SEQ ID NO: 4465 - protein, 16 aa, Artificial Sequence
  Synthetically generated peptide
  VARIANT (1)..(16): Xaa = Any Amino Acid
CCEWXCCNPACXTXGC

SEQ ID NO: 4466 - protein, 17 aa, Artificial Sequence
  Synthetically generated peptide
  VARIANT (1)..(17): Xaa = Any Amino Acid
CCEWXCCNPACXTXXGC

SEQ ID NO: 4467 - protein, 17 aa, Artificial Sequence
  Synthetically generated peptide
  VARIANT (1)..(17): Xaa = Any Amino Acid
CCEWXCCNPACXTXGXC

SEQ ID NO: 4468 - protein, 16 aa, Artificial Sequence
  Synthetically generated peptide
  VARIANT (1)..(16): Xaa = Any Amino Acid
CCEWXCCNPACXTGXC

SEQ ID NO: 4469 - protein, 17 aa, Artificial Sequence
  Synthetically generated peptide
  VARIANT (1)..(17): Xaa = Any Amino Acid
CCEWXCCNPACXTGXXC

SEQ ID NO: 4470 - protein, 15 aa, Artificial Sequence
  Synthetically generated peptide
  VARIANT (1)..(15): Xaa = Any Amino Acid
CCEWXCCNPACTXGC

SEQ ID NO: 4471 - protein, 16 aa, Artificial Sequence
  Synthetically generated peptide
  VARIANT (1)..(16): Xaa = Any Amino Acid
CCEWXCCNPACTXXGC

SEQ ID NO: 4472 - protein, 17 aa, Artificial Sequence
  Synthetically generated peptide
  VARIANT (1)..(17): Xaa = Any Amino Acid
CCEWXCCNPACTXXXGC

SEQ ID NO: 4473 - protein, 17 aa, Artificial Sequence
  Synthetically generated peptide
  VARIANT (1)..(17): Xaa = Any Amino Acid
CCEWXCCNPACTXXGXC

SEQ ID NO: 4474 - protein, 16 aa, Artificial Sequence
  Synthetically generated peptide
  VARIANT (1)..(16): Xaa = Any Amino Acid
CCEWXCCNPACTXGXC

SEQ ID NO: 4475 - protein, 17 aa, Artificial Sequence
  Synthetically generated peptide
  VARIANT (1)..(17): Xaa = Any Amino Acid
CCEWXCCNPACTXGXXC

SEQ ID NO: 4476 - protein, 15 aa, Artificial Sequence
  Synthetically generated peptide
  VARIANT (1)..(15): Xaa = Any Amino Acid
CCEWXCCNPACTGXC

SEQ ID NO: 4477 - protein, 16 aa, Artificial Sequence
  Synthetically generated peptide
  VARIANT (1)..(16): Xaa = Any Amino Acid
CCEWXCCNPACTGXXC

SEQ ID NO: 4478 - protein, 17 aa, Artificial Sequence
  Synthetically generated peptide
  VARIANT (1)..(17): Xaa = Any Amino Acid
CCEWXCCNPACTGXXXC

SEQ ID NO: 4479 - protein, 14 aa, Artificial Sequence
  Synthetically generated peptide
  VARIANT (1)..(14): Xaa = Any Amino Acid
CCEWCCXNPACTGC

SEQ ID NO: 4480 - protein, 15 aa, Artificial Sequence
  Synthetically generated peptide
  VARIANT (1)..(15): Xaa = Any Amino Acid
CCEWCCXXNPACTGC

SEQ ID NO: 4481 - protein, 16 aa, Artificial Sequence
  Synthetically generated peptide
  VARIANT (1)..(16): Xaa = Any Amino Acid
CCEWCCXXXNPACTGC

SEQ ID NO: 4482 - protein, 17 aa, Artificial Sequence
  Synthetically generated peptide
  VARIANT (1)..(17): Xaa = Any Amino Acid
CCEWCCXXXXNPACTGC

SEQ ID NO: 4483 - protein, 17 aa, Artificial Sequence
  Synthetically generated peptide
  VARIANT (1)..(17): Xaa = Any Amino Acid
CCEWCCXXXNXPACTGC

SEQ ID NO: 4484 - protein, 17 aa, Artificial Sequence
  Synthetically generated peptide
  VARIANT (1)..(17): Xaa = Any Amino Acid
CCEWCCXXXNPXACTGC

SEQ ID NO: 4485 - protein, 17 aa, Artificial Sequence
  Synthetically generated peptide
  VARIANT (1)..(17): Xaa = Any Amino Acid
CCEWCCXXXNPAXCTGC

SEQ ID NO: 4486 - protein, 17 aa, Artificial Sequence
  Synthetically generated peptide
  VARIANT (1)..(17): Xaa = Any Amino Acid
CCEWCCXXXNPACXTGC

SEQ ID NO: 4487 - protein, 17 aa, Artificial Sequence
  Synthetically generated peptide
  VARIANT (1)..(17): Xaa = Any Amino Acid
CCEWCCXXXNPACTXGC

SEQ ID NO: 4488 - protein, 17 aa, Artificial Sequence
  Synthetically generated peptide
  VARIANT (1)..(17): Xaa = Any Amino Acid
CCEWCCXXXNPACTGXC

SEQ ID NO: 4489 - protein, 16 aa, Artificial Sequence
  Synthetically generated peptide
  VARIANT (1)..(16): Xaa = Any Amino Acid
CCEWCCXXNXPACTGC

SEQ ID NO: 4490 - protein, 17 aa, Artificial Sequence
  Synthetically generated peptide
  VARIANT (1)..(17): Xaa = Any Amino Acid
CCEWCCXXNXXPACTGC

SEQ ID NO: 4491 - protein, 17 aa, Artificial Sequence
  Synthetically generated peptide
  VARIANT (1)..(17): Xaa = Any Amino Acid
CCEWCCXXNXPXACTGC

SEQ ID NO: 4492 - protein, 17 aa, Artificial Sequence
  Synthetically generated peptide
  VARIANT (1)..(17): Xaa = Any Amino Acid
CCEWCCXXNXPAXCTGC

SEQ ID NO: 4493 - protein, 17 aa, Artificial Sequence
  Synthetically generated peptide
  VARIANT (1)..(17): Xaa = Any Amino Acid
CCEWCCXXNXPACXTGC

SEQ ID NO: 4494 - protein, 17 aa, Artificial Sequence
  Synthetically generated peptide
  VARIANT (1)..(17): Xaa = Any Amino Acid
CCEWCCXXNXPACTXGC

SEQ ID NO: 4495 - protein, 17 aa, Artificial Sequence
  Synthetically generated peptide
  VARIANT (1)..(17): Xaa = Any Amino Acid
CCEWCCXXNXPACTGXC

SEQ ID NO: 4496 - protein, 16 aa, Artificial Sequence
  Synthetically generated peptide
  VARIANT (1)..(16): Xaa = Any Amino Acid
CCEWCCXXNPXACTGC

SEQ ID NO: 4497 - protein, 17 aa, Artificial Sequence
  Synthetically generated peptide
  VARIANT (1)..(17): Xaa = Any Amino Acid
CCEWCCXXNPXXACTGC

SEQ ID NO: 4498 - protein, 17 aa, Artificial Sequence
  Synthetically generated peptide
  VARIANT (1)..(17): Xaa = Any Amino Acid
CCEWCCXXNPXAXCTGC

SEQ ID NO: 4499 - protein, 17 aa, Artificial Sequence
  Synthetically generated peptide
  VARIANT (1)..(17): Xaa = Any Amino Acid
CCEWCCXXNPXACXTGC

SEQ ID NO: 4500 - protein, 17 aa, Artificial Sequence
  Synthetically generated peptide
  VARIANT (1)..(17): Xaa = Any Amino Acid
CCEWCCXXNPXACTXGC

SEQ ID NO: 4501 - protein, 17 aa, Artificial Sequence
  Synthetically generated peptide
  VARIANT (1)..(17): Xaa = Any Amino Acid
CCEWCCXXNPXACTGXC

SEQ ID NO: 4502 - protein, 16 aa, Artificial Sequence
  Synthetically generated peptide
  VARIANT (1)..(16): Xaa = Any Amino Acid
CCEWCCXXNPAXCTGC

SEQ ID NO: 4503 - protein, 17 aa, Artificial Sequence
  Synthetically generated peptide
  VARIANT (1)..(17): Xaa = Any Amino Acid
CCEWCCXXNPAXXCTGC

SEQ ID NO: 4504 - protein, 17 aa, Artificial Sequence
  Synthetically generated peptide
  VARIANT (1)..(17): Xaa = Any Amino Acid
CCEWCCXXNPAXCXTGC

SEQ ID NO: 4505 - protein, 17 aa, Artificial Sequence
  Synthetically generated peptide
  VARIANT (1)..(17): Xaa = Any Amino Acid
CCEWCCXXNPAXCTXGC

SEQ ID NO: 4506 - protein, 17 aa, Artificial Sequence
  Synthetically generated peptide
  VARIANT (1)..(17): Xaa = Any Amino Acid
CCEWCCXXNPAXCTGXC

SEQ ID NO: 4507 - protein, 16 aa, Artificial Sequence
  Synthetically generated peptide
  VARIANT (1)..(16): Xaa = Any Amino Acid
CCEWCCXXNPACXTGC

SEQ ID NO: 4508 - protein, 17 aa, Artificial Sequence
  Synthetically generated peptide
  VARIANT (1)..(17): Xaa = Any Amino Acid
CCEWCCXXNPACXXTGC

SEQ ID NO: 4509 - protein, 17 aa, Artificial Sequence
  Synthetically generated peptide
  VARIANT (1)..(17): Xaa = Any Amino Acid
CCEWCCXXNPACXTXGC

SEQ ID NO: 4510 - protein, 17 aa, Artificial Sequence
  Synthetically generated peptide
  VARIANT (1)..(17): Xaa = Any Amino Acid
CCEWCCXXNPACXTGXC

SEQ ID NO: 4511 - protein, 16 aa, Artificial Sequence
  Synthetically generated peptide
  VARIANT (1)..(16): Xaa = Any Amino Acid
CCEWCCXXNPACTXGC

SEQ ID NO: 4512 - protein, 17 aa, Artificial Sequence
  Synthetically generated peptide
  VARIANT (1)..(17): Xaa = Any Amino Acid
CCEWCCXXNPACTXXGC

SEQ ID NO: 4513 - protein, 17 aa, Artificial Sequence
  Synthetically generated peptide
  VARIANT (1)..(17): Xaa = Any Amino Acid
CCEWCCXXNPACTXGXC

SEQ ID NO: 4514 - protein, 16 aa, Artificial Sequence
  Synthetically generated peptide
  VARIANT (1)..(16): Xaa = Any Amino Acid
CCEWCCXXNPACTGXC

SEQ ID NO: 4515 - protein, 17 aa, Artificial Sequence
  Synthetically generated peptide
  VARIANT (1)..(17): Xaa = Any Amino Acid
CCEWCCXXNPACTGXXC

SEQ ID NO: 4516 - protein, 15 aa, Artificial Sequence
  Synthetically generated peptide
  VARIANT (1)..(15): Xaa = Any Amino Acid
CCEWCCXNXPACTGC

SEQ ID NO: 4517 - protein, 16 aa, Artificial Sequence
  Synthetically generated peptide
  VARIANT (1)..(16): Xaa = Any Amino Acid
CCEWCCXNXXPACTGC

SEQ ID NO: 4518 - protein, 17 aa, Artificial Sequence
  Synthetically generated peptide
  VARIANT (1)..(17): Xaa = Any Amino Acid
CCEWCCXNXXXPACTGC

SEQ ID NO: 4519 - protein, 17 aa, Artificial Sequence
  Synthetically generated peptide
  VARIANT (1)..(17): Xaa = Any Amino Acid
CCEWCCXNXXPXACTGC

SEQ ID NO: 4520 - protein, 17 aa, Artificial Sequence
  Synthetically generated peptide
  VARIANT (1)..(17): Xaa = Any Amino Acid
CCEWCCXNXXPAXCTGC

SEQ ID NO: 4521 - protein, 17 aa, Artificial Sequence
  Synthetically generated peptide
  VARIANT (1)..(17): Xaa = Any Amino Acid
CCEWCCXNXXPACXTGC

SEQ ID NO: 4522 - protein, 17 aa, Artificial Sequence
  Synthetically generated peptide
  VARIANT (1)..(17): Xaa = Any Amino Acid
CCEWCCXNXXPACTXGC

SEQ ID NO: 4523 - protein, 17 aa, Artificial Sequence
  Synthetically generated peptide
  VARIANT (1)..(17): Xaa = Any Amino Acid
CCEWCCXNXXPACTGXC

SEQ ID NO: 4524 - protein, 16 aa, Artificial Sequence
  Synthetically generated peptide
  VARIANT (1)..(16): Xaa = Any Amino Acid
CCEWCCXNXPXACTGC

SEQ ID NO: 4525 - protein, 17 aa, Artificial Sequence
  Synthetically generated peptide
  VARIANT (1)..(17): Xaa = Any Amino Acid
CCEWCCXNXPXXACTGC

SEQ ID NO: 4526 - protein, 17 aa, Artificial Sequence
  Synthetically generated peptide
  VARIANT (1)..(17): Xaa = Any Amino Acid
CCEWCCXNXPXAXCTGC

SEQ ID NO: 4527 - protein, 17 aa, Artificial Sequence
  Synthetically generated peptide
  VARIANT (1)..(17): Xaa = Any Amino Acid
CCEWCCXNXPXACXTGC

SEQ ID NO: 4528 - protein, 17 aa, Artificial Sequence
  Synthetically generated peptide
  VARIANT (1)..(17): Xaa = Any Amino Acid
CCEWCCXNXPXACTXGC

SEQ ID NO: 4529 - protein, 17 aa, Artificial Sequence
  Synthetically generated peptide
  VARIANT (1)..(17): Xaa = Any Amino Acid
CCEWCCXNXPXACTGXC

SEQ ID NO: 4530 - protein, 16 aa, Artificial Sequence
  Synthetically generated peptide
  VARIANT (1)..(16): Xaa = Any Amino Acid
CCEWCCXNXPAXCTGC

SEQ ID NO: 4531 - protein, 17 aa, Artificial Sequence
  Synthetically generated peptide
  VARIANT (1)..(17): Xaa = Any Amino Acid
CCEWCCXNXPAXXCTGC

SEQ ID NO: 4532 - protein, 17 aa, Artificial Sequence
  Synthetically generated peptide
  VARIANT (1)..(17): Xaa = Any Amino Acid
CCEWCCXNXPAXCXTGC

SEQ ID NO: 4533 - protein, 17 aa, Artificial Sequence
  Synthetically generated peptide
  VARIANT (1)..(17): Xaa = Any Amino Acid
CCEWCCXNXPAXCTXGC

SEQ ID NO: 4534 - protein, 17 aa, Artificial Sequence
  Synthetically generated peptide
  VARIANT (1)..(17): Xaa = Any Amino Acid
CCEWCCXNXPAXCTGXC

SEQ ID NO: 4535 - protein, 16 aa, Artificial Sequence
  Synthetically generated peptide
  VARIANT (1)..(16): Xaa = Any Amino Acid
CCEWCCXNXPACXTGC

SEQ ID NO: 4536 - protein, 17 aa, Artificial Sequence
  Synthetically generated peptide
  VARIANT (1)..(17): Xaa = Any Amino Acid
CCEWCCXNXPACXXTGC

SEQ ID NO: 4537 - protein, 17 aa, Artificial Sequence
  Synthetically generated peptide
  VARIANT (1)..(17): Xaa = Any Amino Acid
CCEWCCXNXPACXTXGC

SEQ ID NO: 4538 - protein, 17 aa, Artificial Sequence
  Synthetically generated peptide
  VARIANT (1)..(17): Xaa = Any Amino Acid
CCEWCCXNXPACXTGXC

SEQ ID NO: 4539 - protein, 16 aa, Artificial Sequence
  Synthetically generated peptide
  VARIANT (1)..(16): Xaa = Any Amino Acid
CCEWCCXNXPACTXGC

SEQ ID NO: 4540 - protein, 17 aa, Artificial Sequence
  Synthetically generated peptide
  VARIANT (1)..(17): Xaa = Any Amino Acid
CCEWCCXNXPACTXXGC

SEQ ID NO: 4541 - protein, 17 aa, Artificial Sequence
  Synthetically generated peptide
  VARIANT (1)..(17): Xaa = Any Amino Acid
CCEWCCXNXPACTXGXC

SEQ ID NO: 4542 - protein, 16 aa, Artificial Sequence
  Synthetically generated peptide
  VARIANT (1)..(16): Xaa = Any Amino Acid
CCEWCCXNXPACTGXC

SEQ ID NO: 4543 - protein, 17 aa, Artificial Sequence
  Synthetically generated peptide
  VARIANT (1)..(17): Xaa = Any Amino Acid
CCEWCCXNXPACTGXXC

SEQ ID NO: 4544 - protein, 15 aa, Artificial Sequence
  Synthetically generated peptide
  VARIANT (1)..(15): Xaa = Any Amino Acid
CCEWCCXNPXACTGC

SEQ ID NO: 4545 - protein, 16 aa, Artificial Sequence
  Synthetically generated peptide
  VARIANT (1)..(16): Xaa = Any Amino Acid
CCEWCCXNPXXACTGC

SEQ ID NO: 4546 - protein, 17 aa, Artificial Sequence
  Synthetically generated peptide
  VARIANT (1)..(17): Xaa = Any Amino Acid
CCEWCCXNPXXXACTGC

SEQ ID NO: 4547 - protein, 17 aa, Artificial Sequence
  Synthetically generated peptide
  VARIANT (1)..(17): Xaa = Any Amino Acid
CCEWCCXNPXXAXCTGC

SEQ ID NO: 4548 - protein, 17 aa, Artificial Sequence
  Synthetically generated peptide
  VARIANT (1)..(17): Xaa = Any Amino Acid
CCEWCCXNPXXACXTGC

SEQ ID NO: 4549 - protein, 17 aa, Artificial Sequence
  Synthetically generated peptide
  VARIANT (1)..(17): Xaa = Any Amino Acid
CCEWCCXNPXXACTXGC

SEQ ID NO: 4550 - protein, 17 aa, Artificial Sequence
  Synthetically generated peptide
  VARIANT (1)..(17): Xaa = Any Amino Acid
CCEWCCXNPXXACTGXC

SEQ ID NO: 4551 - protein, 16 aa, Artificial Sequence
  Synthetically generated peptide
  VARIANT (1)..(16): Xaa = Any Amino Acid
CCEWCCXNPXAXCTGC

SEQ ID NO: 4552 - protein, 17 aa, Artificial Sequence
  Synthetically generated peptide
  VARIANT (1)..(17): Xaa = Any Amino Acid
CCEWCCXNPXAXXCTGC

SEQ ID NO: 4553 - protein, 17 aa, Artificial Sequence
  Synthetically generated peptide
  VARIANT (1)..(17): Xaa = Any Amino Acid
CCEWCCXNPXAXCXTGC

SEQ ID NO: 4554 - protein, 17 aa, Artificial Sequence
  Synthetically generated peptide
  VARIANT (1)..(17): Xaa = Any Amino Acid
CCEWCCXNPXAXCTXGC

SEQ ID NO: 4555 - protein, 17 aa, Artificial Sequence
  Synthetically generated peptide
  VARIANT (1)..(17): Xaa = Any Amino Acid
CCEWCCXNPXAXCTGXC

SEQ ID NO: 4556 - protein, 16 aa, Artificial Sequence
  Synthetically generated peptide
  VARIANT (1)..(16): Xaa = Any Amino Acid
CCEWCCXNPXACXTGC

SEQ ID NO: 4557 - protein, 17 aa, Artificial Sequence
  Synthetically generated peptide
  VARIANT (1)..(17): Xaa = Any Amino Acid
CCEWCCXNPXACXXTGC

SEQ ID NO: 4558 - protein, 17 aa, Artificial Sequence
  Synthetically generated peptide
  VARIANT (1)..(17): Xaa = Any Amino Acid
CCEWCCXNPXACXTXGC

SEQ ID NO: 4559 - protein, 17 aa, Artificial Sequence
  Synthetically generated peptide
  VARIANT (1)..(17): Xaa = Any Amino Acid
CCEWCCXNPXACXTGXC

SEQ ID NO: 4560 - protein, 16 aa, Artificial Sequence
  Synthetically generated peptide
  VARIANT (1)..(16): Xaa = Any Amino Acid
CCEWCCXNPXACTXGC

SEQ ID NO: 4561 - protein, 17 aa, Artificial Sequence
  Synthetically generated peptide
  VARIANT (1)..(17): Xaa = Any Amino Acid
CCEWCCXNPXACTXXGC

SEQ ID NO: 4562 - protein, 17 aa, Artificial Sequence
  Synthetically generated peptide
  VARIANT (1)..(17): Xaa = Any Amino Acid
CCEWCCXNPXACTXGXC

SEQ ID NO: 4563 - protein, 16 aa, Artificial Sequence
  Synthetically generated peptide
  VARIANT (1)..(16): Xaa = Any Amino Acid
CCEWCCXNPXACTGXC

SEQ ID NO: 4564 - protein, 17 aa, Artificial Sequence
  Synthetically generated peptide
  VARIANT (1)..(17): Xaa = Any Amino Acid
CCEWCCXNPXACTGXXC

SEQ ID NO: 4565 - protein, 15 aa, Artificial Sequence
  Synthetically generated peptide
  VARIANT (1)..(15): Xaa = Any Amino Acid
CCEWCCXNPAXCTGC

SEQ ID NO: 4566 - protein, 16 aa, Artificial Sequence
  Synthetically generated peptide
  VARIANT (1)..(16): Xaa = Any Amino Acid
CCEWCCXNPAXXCTGC

SEQ ID NO: 4567 - protein, 17 aa, Artificial Sequence
  Synthetically generated peptide
  VARIANT (1)..(17): Xaa = Any Amino Acid
CCEWCCXNPAXXXCTGC

SEQ ID NO: 4568 - protein, 17 aa, Artificial Sequence
  Synthetically generated peptide
  VARIANT (1)..(17): Xaa = Any Amino Acid
CCEWCCXNPAXXCXTGC

SEQ ID NO: 4569 - protein, 17 aa, Artificial Sequence
  Synthetically generated peptide
  VARIANT (1)..(17): Xaa = Any Amino Acid
CCEWCCXNPAXXCTXGC

SEQ ID NO: 4570 - protein, 17 aa, Artificial Sequence
  Synthetically generated peptide
  VARIANT (1)..(17): Xaa = Any Amino Acid
CCEWCCXNPAXXCTGXC

SEQ ID NO: 4571 - protein, 16 aa, Artificial Sequence
  Synthetically generated peptide
  VARIANT (1)..(16): Xaa = Any Amino Acid
CCEWCCXNPAXCXTGC

SEQ ID NO: 4572 - protein, 17 aa, Artificial Sequence
  Synthetically generated peptide
  VARIANT (1)..(17): Xaa = Any Amino Acid
CCEWCCXNPAXCXXTGC

SEQ ID NO: 4573 - protein, 17 aa, Artificial Sequence
  Synthetically generated peptide
  VARIANT (1)..(17): Xaa = Any Amino Acid
CCEWCCXNPAXCXTXGC

SEQ ID NO: 4574 - protein, 17 aa, Artificial Sequence
  Synthetically generated peptide
  VARIANT (1)..(17): Xaa = Any Amino Acid
CCEWCCXNPAXCXTGXC

SEQ ID NO: 4575 - protein, 16 aa, Artificial Sequence
  Synthetically generated peptide
  VARIANT (1)..(16): Xaa = Any Amino Acid
CCEWCCXNPAXCTXGC

SEQ ID NO: 4576 - protein, 17 aa, Artificial Sequence
  Synthetically generated peptide
  VARIANT (1)..(17): Xaa = Any Amino Acid
CCEWCCXNPAXCTXXGC

SEQ ID NO: 4577 - protein, 17 aa, Artificial Sequence
  Synthetically generated peptide
  VARIANT (1)..(17): Xaa = Any Amino Acid
CCEWCCXNPAXCTXGXC

SEQ ID NO: 4578 - protein, 16 aa, Artificial Sequence
  Synthetically generated peptide
  VARIANT (1)..(16): Xaa = Any Amino Acid
CCEWCCXNPAXCTGXC

SEQ ID NO: 4579 - protein, 17 aa, Artificial Sequence
  Synthetically generated peptide
  VARIANT (1)..(17): Xaa = Any Amino Acid
CCEWCCXNPAXCTGXXC

SEQ ID NO: 4580 - protein, 15 aa, Artificial Sequence
  Synthetically generated peptide
  VARIANT (1)..(15): Xaa = Any Amino Acid
CCEWCCXNPACXTGC

SEQ ID NO: 4581 - protein, 16 aa, Artificial Sequence
  Synthetically generated peptide
  VARIANT (1)..(16): Xaa = Any Amino Acid
CCEWCCXNPACXXTGC

SEQ ID NO: 4582 - protein, 17 aa, Artificial Sequence
  Synthetically generated peptide
  VARIANT (1)..(17): Xaa = Any Amino Acid
CCEWCCXNPACXXXTGC

SEQ ID NO: 4583 - protein, 17 aa, Artificial Sequence
  Synthetically generated peptide
  VARIANT (1)..(17): Xaa = Any Amino Acid
CCEWCCXNPACXXTXGC

SEQ ID NO: 4584 - protein, 17 aa, Artificial Sequence
  Synthetically generated peptide
  VARIANT (1)..(17): Xaa = Any Amino Acid
CCEWCCXNPACXXTGXC

SEQ ID NO: 4585 - protein, 16 aa, Artificial Sequence
  Synthetically generated peptide
  VARIANT (1)..(16): Xaa = Any Amino Acid
CCEWCCXNPACXTXGC

SEQ ID NO: 4586 - protein, 17 aa, Artificial Sequence
  Synthetically generated peptide
  VARIANT (1)..(17): Xaa = Any Amino Acid
CCEWCCXNPACXTXXGC

SEQ ID NO: 4587 - protein, 17 aa, Artificial Sequence
  Synthetically generated peptide
  VARIANT (1)..(17): Xaa = Any Amino Acid
CCEWCCXNPACXTXGXC

SEQ ID NO: 4588 - protein, 16 aa, Artificial Sequence
  Synthetically generated peptide
  VARIANT (1)..(16): Xaa = Any Amino Acid
CCEWCCXNPACXTGXC

SEQ ID NO: 4589 - protein, 17 aa, Artificial Sequence
  Synthetically generated peptide
  VARIANT (1)..(17): Xaa = Any Amino Acid
CCEWCCXNPACXTGXXC

SEQ ID NO: 4590 - protein, 15 aa, Artificial Sequence
  Synthetically generated peptide
  VARIANT (1)..(15): Xaa = Any Amino Acid
CCEWCCXNPACTXGC

SEQ ID NO: 4591 - protein, 16 aa, Artificial Sequence
  Synthetically generated peptide
  VARIANT (1)..(16): Xaa = Any Amino Acid
CCEWCCXNPACTXXGC

SEQ ID NO: 4592 - protein, 17 aa, Artificial Sequence
  Synthetically generated peptide
  VARIANT (1)..(17): Xaa = Any Amino Acid
CCEWCCXNPACTXXXGC

SEQ ID NO: 4593 - protein, 17 aa, Artificial Sequence
  Synthetically generated peptide
  VARIANT (1)..(17): Xaa = Any Amino Acid
CCEWCCXNPACTXXGXC

SEQ ID NO: 4594 - protein, 16 aa, Artificial Sequence
  Synthetically generated peptide
  VARIANT (1)..(16): Xaa = Any Amino Acid
CCEWCCXNPACTXGXC

SEQ ID NO: 4595 - protein, 17 aa, Artificial Sequence
  Synthetically generated peptide
  VARIANT (1)..(17): Xaa = Any Amino Acid
CCEWCCXNPACTXGXXC

SEQ ID NO: 4596 - protein, 15 aa, Artificial Sequence
  Synthetically generated peptide
  VARIANT (1)..(15): Xaa = Any Amino Acid
CCEWCCXNPACTGXC

SEQ ID NO: 4597 - protein, 16 aa, Artificial Sequence
  Synthetically generated peptide
  VARIANT (1)..(16): Xaa = Any Amino Acid
CCEWCCXNPACTGXXC

SEQ ID NO: 4598 - protein, 17 aa, Artificial Sequence
  Synthetically generated peptide
  VARIANT (1)..(17): Xaa = Any Amino Acid
CCEWCCXNPACTGXXXC

SEQ ID NO: 4599 - protein, 14 aa, Artificial Sequence
  Synthetically generated peptide
  VARIANT (1)..(14): Xaa = Any Amino Acid
CCEWCCNXPACTGC

SEQ ID NO: 4600 - protein, 15 aa, Artificial Sequence
  Synthetically generated peptide
  VARIANT (1)..(15): Xaa = Any Amino Acid
CCEWCCNXXPACTGC

SEQ ID NO: 4601 - protein, 16 aa, Artificial Sequence
  Synthetically generated peptide
  VARIANT (1)..(16): Xaa = Any Amino Acid
CCEWCCNXXXPACTGC

SEQ ID NO: 4602 - protein, 17 aa, Artificial Sequence
  Synthetically generated peptide
  VARIANT (1)..(17): Xaa = Any Amino Acid
CCEWCCNXXXXPACTGC

SEQ ID NO: 4603 - protein, 17 aa, Artificial Sequence
  Synthetically generated peptide
  VARIANT (1)..(17): Xaa = Any Amino Acid
CCEWCCNXXXPXACTGC

SEQ ID NO: 4604 - protein, 17 aa, Artificial Sequence
  Synthetically generated peptide
  VARIANT (1)..(17): Xaa = Any Amino Acid
CCEWCCNXXXPAXCTGC

SEQ ID NO: 4605 - protein, 17 aa, Artificial Sequence
  Synthetically generated peptide
  VARIANT (1)..(17): Xaa = Any Amino Acid
CCEWCCNXXXPACXTGC

SEQ ID NO: 4606 - protein, 17 aa, Artificial Sequence
  Synthetically generated peptide
  VARIANT (1)..(17): Xaa = Any Amino Acid
CCEWCCNXXXPACTXGC

SEQ ID NO: 4607 - protein, 17 aa, Artificial Sequence
  Synthetically generated peptide
  VARIANT (1)..(17): Xaa = Any Amino Acid
CCEWCCNXXXPACTGXC

SEQ ID NO: 4608 - protein, 16 aa, Artificial Sequence
  Synthetically generated peptide
  VARIANT (1)..(16): Xaa = Any Amino Acid
CCEWCCNXXPXACTGC

SEQ ID NO: 4609 - protein, 17 aa, Artificial Sequence
  Synthetically generated peptide
  VARIANT (1)..(17): Xaa = Any Amino Acid
CCEWCCNXXPXXACTGC

SEQ ID NO: 4610 - protein, 17 aa, Artificial Sequence
  Synthetically generated peptide
  VARIANT (1)..(17): Xaa = Any Amino Acid
CCEWCCNXXPXAXCTGC

SEQ ID NO: 4611 - protein, 17 aa, Artificial Sequence
  Synthetically generated peptide
  VARIANT (1)..(17): Xaa = Any Amino Acid
CCEWCCNXXPXACXTGC

SEQ ID NO: 4612 - protein, 17 aa, Artificial Sequence
  Synthetically generated peptide
  VARIANT (1)..(17): Xaa = Any Amino Acid
CCEWCCNXXPXACTXGC

SEQ ID NO: 4613 - protein, 17 aa, Artificial Sequence
  Synthetically generated peptide
  VARIANT (1)..(17): Xaa = Any Amino Acid
CCEWCCNXXPXACTGXC

SEQ ID NO: 4614 - protein, 16 aa, Artificial Sequence
  Synthetically generated peptide
  VARIANT (1)..(16): Xaa = Any Amino Acid
CCEWCCNXXPAXCTGC

SEQ ID NO: 4615 - protein, 17 aa, Artificial Sequence
  Synthetically generated peptide
  VARIANT (1)..(17): Xaa = Any Amino Acid
CCEWCCNXXPAXXCTGC

SEQ ID NO: 4616 - protein, 17 aa, Artificial Sequence
  Synthetically generated peptide
  VARIANT (1)..(17): Xaa = Any Amino Acid
CCEWCCNXXPAXCXTGC

SEQ ID NO: 4617 - protein, 17 aa, Artificial Sequence
  Synthetically generated peptide
  VARIANT (1)..(17): Xaa = Any Amino Acid
CCEWCCNXXPAXCTXGC

SEQ ID NO: 4618 - protein, 17 aa, Artificial Sequence
  Synthetically generated peptide
  VARIANT (1)..(17): Xaa = Any Amino Acid
CCEWCCNXXPAXCTGXC

SEQ ID NO: 4619 - protein, 16 aa, Artificial Sequence
  Synthetically generated peptide
  VARIANT (1)..(16): Xaa = Any Amino Acid
CCEWCCNXXPACXTGC

SEQ ID NO: 4620 - protein, 17 aa, Artificial Sequence
  Synthetically generated peptide
  VARIANT (1)..(17): Xaa = Any Amino Acid
CCEWCCNXXPACXXTGC

SEQ ID NO: 4621 - protein, 17 aa, Artificial Sequence
  Synthetically generated peptide
  VARIANT (1)..(17): Xaa = Any Amino Acid
CCEWCCNXXPACXTXGC

SEQ ID NO: 4622 - protein, 17 aa, Artificial Sequence
  Synthetically generated peptide
  VARIANT (1)..(17): Xaa = Any Amino Acid
CCEWCCNXXPACXTGXC

SEQ ID NO: 4623 - protein, 16 aa, Artificial Sequence
  Synthetically generated peptide
  VARIANT (1)..(16): Xaa = Any Amino Acid
CCEWCCNXXPACTXGC

SEQ ID NO: 4624 - protein, 17 aa, Artificial Sequence
  Synthetically generated peptide
  VARIANT (1)..(17): Xaa = Any Amino Acid
CCEWCCNXXPACTXXGC

SEQ ID NO: 4625 - protein, 17 aa, Artificial Sequence
  Synthetically generated peptide
  VARIANT (1)..(17): Xaa = Any Amino Acid
CCEWCCNXXPACTXGXC

SEQ ID NO: 4626 - protein, 16 aa, Artificial Sequence
  Synthetically generated peptide
  VARIANT (1)..(16): Xaa = Any Amino Acid
CCEWCCNXXPACTGXC

SEQ ID NO: 4627 - protein, 17 aa, Artificial Sequence
  Synthetically generated peptide
  VARIANT (1)..(17): Xaa = Any Amino Acid
CCEWCCNXXPACTGXXC

SEQ ID NO: 4628 - protein, 15 aa, Artificial Sequence
  Synthetically generated peptide
  VARIANT (1)..(15): Xaa = Any Amino Acid
CCEWCCNXPXACTGC

SEQ ID NO: 4629 - protein, 16 aa, Artificial Sequence
  Synthetically generated peptide
  VARIANT (1)..(16): Xaa = Any Amino Acid
CCEWCCNXPXXACTGC

SEQ ID NO: 4630 - protein, 17 aa, Artificial Sequence
  Synthetically generated peptide
  VARIANT (1)..(17): Xaa = Any Amino Acid
CCEWCCNXPXXXACTGC

SEQ ID NO: 4631 - protein, 17 aa, Artificial Sequence
  Synthetically generated peptide
  VARIANT (1)..(17): Xaa = Any Amino Acid
CCEWCCNXPXXAXCTGC

SEQ ID NO: 4632 - protein, 17 aa, Artificial Sequence
  Synthetically generated peptide
  VARIANT (1)..(17): Xaa = Any Amino Acid
CCEWCCNXPXXACXTGC

SEQ ID NO: 4633 - protein, 17 aa, Artificial Sequence
  Synthetically generated peptide
  VARIANT (1)..(17): Xaa = Any Amino Acid
CCEWCCNXPXXACTXGC

SEQ ID NO: 4634 - protein, 17 aa, Artificial Sequence
  Synthetically generated peptide
  VARIANT (1)..(17): Xaa = Any Amino Acid
CCEWCCNXPXXACTGXC

SEQ ID NO: 4635 - protein, 16 aa, Artificial Sequence
  Synthetically generated peptide
  VARIANT (1)..(16): Xaa = Any Amino Acid
CCEWCCNXPXAXCTGC

SEQ ID NO: 4636 - protein, 17 aa, Artificial Sequence
  Synthetically generated peptide
  VARIANT (1)..(17): Xaa = Any Amino Acid
CCEWCCNXPXAXXCTGC

SEQ ID NO: 4637 - protein, 17 aa, Artificial Sequence
  Synthetically generated peptide
  VARIANT (1)..(17): Xaa = Any Amino Acid
CCEWCCNXPXAXCXTGC

SEQ ID NO: 4638 - protein, 17 aa, Artificial Sequence
  Synthetically generated peptide
  VARIANT (1)..(17): Xaa = Any Amino Acid
CCEWCCNXPXAXCTXGC

SEQ ID NO: 4639 - protein, 17 aa, Artificial Sequence
  Synthetically generated peptide
  VARIANT (1)..(17): Xaa = Any Amino Acid
CCEWCCNXPXAXCTGXC

SEQ ID NO: 4640 - protein, 16 aa, Artificial Sequence
  Synthetically generated peptide
  VARIANT (1)..(16): Xaa = Any Amino Acid
CCEWCCNXPXACXTGC

SEQ ID NO: 4641 - protein, 17 aa, Artificial Sequence
  Synthetically generated peptide
  VARIANT (1)..(17): Xaa = Any Amino Acid
CCEWCCNXPXACXXTGC

SEQ ID NO: 4642 - protein, 17 aa, Artificial Sequence
  Synthetically generated peptide
  VARIANT (1)..(17): Xaa = Any Amino Acid
CCEWCCNXPXACXTXGC

SEQ ID NO: 4643 - protein, 17 aa, Artificial Sequence
  Synthetically generated peptide
  VARIANT (1)..(17): Xaa = Any Amino Acid
CCEWCCNXPXACXTGXC

SEQ ID NO: 4644 - protein, 16 aa, Artificial Sequence
  Synthetically generated peptide
  VARIANT (1)..(16): Xaa = Any Amino Acid
CCEWCCNXPXACTXGC

SEQ ID NO: 4645 - protein, 17 aa, Artificial Sequence
  Synthetically generated peptide
  VARIANT (1)..(17): Xaa = Any Amino Acid
CCEWCCNXPXACTXXGC

SEQ ID NO: 4646 - protein, 17 aa, Artificial Sequence
  Synthetically generated peptide
  VARIANT (1)..(17): Xaa = Any Amino Acid
CCEWCCNXPXACTXGXC

SEQ ID NO: 4647 - protein, 16 aa, Artificial Sequence
  Synthetically generated peptide
  VARIANT (1)..(16): Xaa = Any Amino Acid
CCEWCCNXPXACTGXC

SEQ ID NO: 4648 - protein, 17 aa, Artificial Sequence
  Synthetically generated peptide
  VARIANT (1)..(17): Xaa = Any Amino Acid
CCEWCCNXPXACTGXXC

SEQ ID NO: 4649 - protein, 15 aa, Artificial Sequence
  Synthetically generated peptide
  VARIANT (1)..(15): Xaa = Any Amino Acid
CCEWCCNXPAXCTGC

SEQ ID NO: 4650 - protein, 16 aa, Artificial Sequence
  Synthetically generated peptide
  VARIANT (1)..(16): Xaa = Any Amino Acid
CCEWCCNXPAXXCTGC

SEQ ID NO: 4651 - protein, 17 aa, Artificial Sequence
  Synthetically generated peptide
  VARIANT (1)..(17): Xaa = Any Amino Acid
CCEWCCNXPAXXXCTGC

SEQ ID NO: 4652 - protein, 17 aa, Artificial Sequence
  Synthetically generated peptide
  VARIANT (1)..(17): Xaa = Any Amino Acid
CCEWCCNXPAXXCXTGC

SEQ ID NO: 4653 - protein, 17 aa, Artificial Sequence
  Synthetically generated peptide
  VARIANT (1)..(17): Xaa = Any Amino Acid
CCEWCCNXPAXXCTXGC

SEQ ID NO: 4654 - protein, 17 aa, Artificial Sequence
  Synthetically generated peptide
  VARIANT (1)..(17): Xaa = Any Amino Acid
CCEWCCNXPAXXCTGXC

SEQ ID NO: 4655 - protein, 16 aa, Artificial Sequence
  Synthetically generated peptide
  VARIANT (1)..(16): Xaa = Any Amino Acid
CCEWCCNXPAXCXTGC

SEQ ID NO: 4656 - protein, 17 aa, Artificial Sequence
  Synthetically generated peptide
  VARIANT (1)..(17): Xaa = Any Amino Acid
CCEWCCNXPAXCXXTGC

SEQ ID NO: 4657 - protein, 17 aa, Artificial Sequence
  Synthetically generated peptide
  VARIANT (1)..(17): Xaa = Any Amino Acid
CCEWCCNXPAXCXTXGC

SEQ ID NO: 4658 - protein, 17 aa, Artificial Sequence
  Synthetically generated peptide
  VARIANT (1)..(17): Xaa = Any Amino Acid
CCEWCCNXPAXCXTGXC

SEQ ID NO: 4659 - protein, 16 aa, Artificial Sequence
  Synthetically generated peptide
  VARIANT (1)..(16): Xaa = Any Amino Acid
CCEWCCNXPAXCTXGC

SEQ ID NO: 4660 - protein, 17 aa, Artificial Sequence
  Synthetically generated peptide
  VARIANT (1)..(17): Xaa = Any Amino Acid
CCEWCCNXPAXCTXXGC

SEQ ID NO: 4661 - protein, 17 aa, Artificial Sequence
  Synthetically generated peptide
  VARIANT (1)..(17): Xaa = Any Amino Acid
CCEWCCNXPAXCTXGXC

SEQ ID NO: 4662 - protein, 16 aa, Artificial Sequence
  Synthetically generated peptide
  VARIANT (1)..(16): Xaa = Any Amino Acid
CCEWCCNXPAXCTGXC

SEQ ID NO: 4663 - protein, 17 aa, Artificial Sequence
  Synthetically generated peptide
  VARIANT (1)..(17): Xaa = Any Amino Acid
CCEWCCNXPAXCTGXXC

SEQ ID NO: 4664 - protein, 15 aa, Artificial Sequence
  Synthetically generated peptide
  VARIANT (1)..(15): Xaa = Any Amino Acid
CCEWCCNXPACXTGC

SEQ ID NO: 4665 - protein, 16 aa, Artificial Sequence
  Synthetically generated peptide
  VARIANT (1)..(16): Xaa = Any Amino Acid
CCEWCCNXPACXXTGC

SEQ ID NO: 4666 - protein, 17 aa, Artificial Sequence
  Synthetically generated peptide
  VARIANT (1)..(17): Xaa = Any Amino Acid
CCEWCCNXPACXXXTGC

SEQ ID NO: 4667 - protein, 17 aa, Artificial Sequence
  Synthetically generated peptide
  VARIANT (1)..(17): Xaa = Any Amino Acid
CCEWCCNXPACXXTXGC

SEQ ID NO: 4668 - protein, 17 aa, Artificial Sequence
  Synthetically generated peptide
  VARIANT (1)..(17): Xaa = Any Amino Acid
CCEWCCNXPACXXTGXC

SEQ ID NO: 4669 - protein, 16 aa, Artificial Sequence
  Synthetically generated peptide
  VARIANT (1)..(16): Xaa = Any Amino Acid
CCEWCCNXPACXTXGC

SEQ ID NO: 4670 - protein, 17 aa, Artificial Sequence
  Synthetically generated peptide
  VARIANT (1)..(17): Xaa = Any Amino Acid
CCEWCCNXPACXTXXGC

SEQ ID NO: 4671 - protein, 17 aa, Artificial Sequence
  Synthetically generated peptide
  VARIANT (1)..(17): Xaa = Any Amino Acid
CCEWCCNXPACXTXGXC

SEQ ID NO: 4672 - protein, 16 aa, Artificial Sequence
  Synthetically generated peptide
  VARIANT (1)..(16): Xaa = Any Amino Acid
CCEWCCNXPACXTGXC

SEQ ID NO: 4673 - protein, 17 aa, Artificial Sequence
  Synthetically generated peptide
  VARIANT (1)..(17): Xaa = Any Amino Acid
CCEWCCNXPACXTGXXC

SEQ ID NO: 4674 - protein, 15 aa, Artificial Sequence
  Synthetically generated peptide
  VARIANT (1)..(15): Xaa = Any Amino Acid
CCEWCCNXPACTXGC

SEQ ID NO: 4675 - protein, 16 aa, Artificial Sequence
  Synthetically generated peptide
  VARIANT (1)..(16): Xaa = Any Amino Acid
CCEWCCNXPACTXXGC

SEQ ID NO: 4676 - protein, 17 aa, Artificial Sequence
  Synthetically generated peptide
  VARIANT (1)..(17): Xaa = Any Amino Acid
CCEWCCNXPACTXXXGC

SEQ ID NO: 4677 - protein, 17 aa, Artificial Sequence
  Synthetically generated peptide
  VARIANT (1)..(17): Xaa = Any Amino Acid
CCEWCCNXPACTXXGXC

SEQ ID NO: 4678 - protein, 16 aa, Artificial Sequence
  Synthetically generated peptide
  VARIANT (1)..(16): Xaa = Any Amino Acid
CCEWCCNXPACTXGXC

SEQ ID NO: 4679 - protein, 17 aa, Artificial Sequence
  Synthetically generated peptide
  VARIANT (1)..(17): Xaa = Any Amino Acid
CCEWCCNXPACTXGXXC

SEQ ID NO: 4680 - protein, 15 aa, Artificial Sequence
  Synthetically generated peptide
  VARIANT (1)..(15): Xaa = Any Amino Acid
CCEWCCNXPACTGXC

SEQ ID NO: 4681 - protein, 16 aa, Artificial Sequence
  Synthetically generated peptide
  VARIANT (1)..(16): Xaa = Any Amino Acid
CCEWCCNXPACTGXXC

SEQ ID NO: 4682 - protein, 17 aa, Artificial Sequence
  Synthetically generated peptide
  VARIANT (1)..(17): Xaa = Any Amino Acid
CCEWCCNXPACTGXXXC

SEQ ID NO: 4683 - protein, 14 aa, Artificial Sequence
  Synthetically generated peptide
  VARIANT (1)..(14): Xaa = Any Amino Acid
CCEWCCNPXACTGC

SEQ ID NO: 4684 - protein, 15 aa, Artificial Sequence
  Synthetically generated peptide
  VARIANT (1)..(15): Xaa = Any Amino Acid
CCEWCCNPXXACTGC

SEQ ID NO: 4685 - protein, 16 aa, Artificial Sequence
  Synthetically generated peptide
  VARIANT (1)..(16): Xaa = Any Amino Acid
CCEWCCNPXXXACTGC

SEQ ID NO: 4686 - protein, 17 aa, Artificial Sequence
  Synthetically generated peptide
  VARIANT (1)..(17): Xaa = Any Amino Acid
CCEWCCNPXXXXACTGC

SEQ ID NO: 4687 - protein, 17 aa, Artificial Sequence
  Synthetically generated peptide
  VARIANT (1)..(17): Xaa = Any Amino Acid
CCEWCCNPXXXAXCTGC

SEQ ID NO: 4688 - protein, 17 aa, Artificial Sequence
  Synthetically generated peptide
  VARIANT (1)..(17): Xaa = Any Amino Acid
CCEWCCNPXXXACXTGC

SEQ ID NO: 4689 - protein, 17 aa, Artificial Sequence
  Synthetically generated peptide
  VARIANT (1)..(17): Xaa = Any Amino Acid
CCEWCCNPXXXACTXGC

SEQ ID NO: 4690 - protein, 17 aa, Artificial Sequence
  Synthetically generated peptide
  VARIANT (1)..(17): Xaa = Any Amino Acid
CCEWCCNPXXXACTGXC

SEQ ID NO: 4691 - protein, 16 aa, Artificial Sequence
  Synthetically generated peptide
  VARIANT (1)..(16): Xaa = Any Amino Acid
CCEWCCNPXXAXCTGC

SEQ ID NO: 4692 - protein, 17 aa, Artificial Sequence
  Synthetically generated peptide
  VARIANT (1)..(17): Xaa = Any Amino Acid
CCEWCCNPXXAXXCTGC

SEQ ID NO: 4693 - protein, 17 aa, Artificial Sequence
  Synthetically generated peptide
  VARIANT (1)..(17): Xaa = Any Amino Acid
CCEWCCNPXXAXCXTGC

SEQ ID NO: 4694 - protein, 17 aa, Artificial Sequence
  Synthetically generated peptide
  VARIANT (1)..(17): Xaa = Any Amino Acid
CCEWCCNPXXAXCTXGC

SEQ ID NO: 4695 - protein, 17 aa, Artificial Sequence
  Synthetically generated peptide
  VARIANT (1)..(17): Xaa = Any Amino Acid
CCEWCCNPXXAXCTGXC

SEQ ID NO: 4696 - protein, 16 aa, Artificial Sequence
  Synthetically generated peptide
  VARIANT (1)..(16): Xaa = Any Amino Acid
CCEWCCNPXXACXTGC

SEQ ID NO: 4697 - protein, 17 aa, Artificial Sequence
  Synthetically generated peptide
  VARIANT (1)..(17): Xaa = Any Amino Acid
CCEWCCNPXXACXXTGC

SEQ ID NO: 4698 - protein, 17 aa, Artificial Sequence
  Synthetically generated peptide
  VARIANT (1)..(17): Xaa = Any Amino Acid
CCEWCCNPXXACXTXGC

SEQ ID NO: 4699 - protein, 17 aa, Artificial Sequence
  Synthetically generated peptide
  VARIANT (1)..(17): Xaa = Any Amino Acid
CCEWCCNPXXACXTGXC

SEQ ID NO: 4700 - protein, 16 aa, Artificial Sequence
  Synthetically generated peptide
  VARIANT (1)..(16): Xaa = Any Amino Acid
CCEWCCNPXXACTXGC

SEQ ID NO: 4701 - protein, 17 aa, Artificial Sequence
  Synthetically generated peptide
  VARIANT (1)..(17): Xaa = Any Amino Acid
CCEWCCNPXXACTXXGC

SEQ ID NO: 4702 - protein, 17 aa, Artificial Sequence
  Synthetically generated peptide
  VARIANT (1)..(17): Xaa = Any Amino Acid
CCEWCCNPXXACTXGXC

SEQ ID NO: 4703 - protein, 16 aa, Artificial Sequence
  Synthetically generated peptide
  VARIANT (1)..(16): Xaa = Any Amino Acid
CCEWCCNPXXACTGXC

SEQ ID NO: 4704 - protein, 17 aa, Artificial Sequence
  Synthetically generated peptide
  VARIANT (1)..(17): Xaa = Any Amino Acid
CCEWCCNPXXACTGXXC

SEQ ID NO: 4705 - protein, 15 aa, Artificial Sequence
  Synthetically generated peptide
  VARIANT (1)..(15): Xaa = Any Amino Acid
CCEWCCNPXAXCTGC

SEQ ID NO: 4706 - protein, 16 aa, Artificial Sequence
  Synthetically generated peptide
  VARIANT (1)..(16): Xaa = Any Amino Acid
CCEWCCNPXAXXCTGC

SEQ ID NO: 4707 - protein, 17 aa, Artificial Sequence
  Synthetically generated peptide
  VARIANT (1)..(17): Xaa = Any Amino Acid
CCEWCCNPXAXXXCTGC

SEQ ID NO: 4708 - protein, 17 aa, Artificial Sequence
  Synthetically generated peptide
  VARIANT (1)..(17): Xaa = Any Amino Acid
CCEWCCNPXAXXCXTGC

SEQ ID NO: 4709 - protein, 17 aa, Artificial Sequence
  Synthetically generated peptide
  VARIANT (1)..(17): Xaa = Any Amino Acid
CCEWCCNPXAXXCTXGC

SEQ ID NO: 4710 - protein, 17 aa, Artificial Sequence
  Synthetically generated peptide
  VARIANT (1)..(17): Xaa = Any Amino Acid
CCEWCCNPXAXXCTGXC

SEQ ID NO: 4711 - protein, 16 aa, Artificial Sequence
  Synthetically generated peptide
  VARIANT (1)..(16): Xaa = Any Amino Acid
CCEWCCNPXAXCXTGC

SEQ ID NO: 4712 - protein, 17 aa, Artificial Sequence
  Synthetically generated peptide
  VARIANT (1)..(17): Xaa = Any Amino Acid
CCEWCCNPXAXCXXTGC

SEQ ID NO: 4713 - protein, 17 aa, Artificial Sequence
  Synthetically generated peptide
  VARIANT (1)..(17): Xaa = Any Amino Acid
CCEWCCNPXAXCXTXGC

SEQ ID NO: 4714 - protein, 17 aa, Artificial Sequence
  Synthetically generated peptide
  VARIANT (1)..(17): Xaa = Any Amino Acid
CCEWCCNPXAXCXTGXC

SEQ ID NO: 4715 - protein, 16 aa, Artificial Sequence
  Synthetically generated peptide
  VARIANT (1)..(16): Xaa = Any Amino Acid
CCEWCCNPXAXCTXGC

SEQ ID NO: 4716 - protein, 17 aa, Artificial Sequence
  Synthetically generated peptide
  VARIANT (1)..(17): Xaa = Any Amino Acid
CCEWCCNPXAXCTXXGC

SEQ ID NO: 4717 - protein, 17 aa, Artificial Sequence
  Synthetically generated peptide
  VARIANT (1)..(17): Xaa = Any Amino Acid
CCEWCCNPXAXCTXGXC

SEQ ID NO: 4718 - protein, 16 aa, Artificial Sequence
  Synthetically generated peptide
  VARIANT (1)..(16): Xaa = Any Amino Acid
CCEWCCNPXAXCTGXC

SEQ ID NO: 4719 - protein, 17 aa, Artificial Sequence
  Synthetically generated peptide
  VARIANT (1)..(17): Xaa = Any Amino Acid
CCEWCCNPXAXCTGXXC

SEQ ID NO: 4720 - protein, 15 aa, Artificial Sequence
  Synthetically generated peptide
  VARIANT (1)..(15): Xaa = Any Amino Acid
CCEWCCNPXACXTGC

SEQ ID NO: 4721 - protein, 16 aa, Artificial Sequence
  Synthetically generated peptide
  VARIANT (1)..(16): Xaa = Any Amino Acid
CCEWCCNPXACXXTGC

SEQ ID NO: 4722 - protein, 17 aa, Artificial Sequence
  Synthetically generated peptide
  VARIANT (1)..(17): Xaa = Any Amino Acid
CCEWCCNPXACXXXTGC

SEQ ID NO: 4723 - protein, 17 aa, Artificial Sequence
  Synthetically generated peptide
  VARIANT (1)..(17): Xaa = Any Amino Acid
CCEWCCNPXACXXTXGC

SEQ ID NO: 4724 - protein, 17 aa, Artificial Sequence
  Synthetically generated peptide
  VARIANT (1)..(17): Xaa = Any Amino Acid
CCEWCCNPXACXXTGXC

SEQ ID NO: 4725 - protein, 16 aa, Artificial Sequence
  Synthetically generated peptide
  VARIANT (1)..(16): Xaa = Any Amino Acid
CCEWCCNPXACXTXGC

SEQ ID NO: 4726 - protein, 17 aa, Artificial Sequence
  Synthetically generated peptide
  VARIANT (1)..(17): Xaa = Any Amino Acid
CCEWCCNPXACXTXXGC

SEQ ID NO: 4727 - protein, 17 aa, Artificial Sequence
  Synthetically generated peptide
  VARIANT (1)..(17): Xaa = Any Amino Acid
CCEWCCNPXACXTXGXC

SEQ ID NO: 4728 - protein, 16 aa, Artificial Sequence
  Synthetically generated peptide
  VARIANT (1)..(16): Xaa = Any Amino Acid
CCEWCCNPXACXTGXC

SEQ ID NO: 4729 - protein, 17 aa, Artificial Sequence
  Synthetically generated peptide
  VARIANT (1)..(17): Xaa = Any Amino Acid
CCEWCCNPXACXTGXXC

SEQ ID NO: 4730 - protein, 15 aa, Artificial Sequence
  Synthetically generated peptide
  VARIANT (1)..(15): Xaa = Any Amino Acid
CCEWCCNPXACTXGC

SEQ ID NO: 4731 - protein, 16 aa, Artificial Sequence
  Synthetically generated peptide
  VARIANT (1)..(16): Xaa = Any Amino Acid
CCEWCCNPXACTXXGC

SEQ ID NO: 4732 - protein, 17 aa, Artificial Sequence
  Synthetically generated peptide
  VARIANT (1)..(17): Xaa = Any Amino Acid
CCEWCCNPXACTXXXGC

SEQ ID NO: 4733 - protein, 17 aa, Artificial Sequence
  Synthetically generated peptide
  VARIANT (1)..(17): Xaa = Any Amino Acid
CCEWCCNPXACTXXGXC

SEQ ID NO: 4734 - protein, 16 aa, Artificial Sequence
  Synthetically generated peptide
  VARIANT (1)..(16): Xaa = Any Amino Acid
CCEWCCNPXACTXGXC

SEQ ID NO: 4735 - protein, 17 aa, Artificial Sequence
  Synthetically generated peptide
  VARIANT (1)..(17): Xaa = Any Amino Acid
CCEWCCNPXACTXGXXC

SEQ ID NO: 4736 - protein, 15 aa, Artificial Sequence
  Synthetically generated peptide
  VARIANT (1)..(15): Xaa = Any Amino Acid
CCEWCCNPXACTGXC

SEQ ID NO: 4737 - protein, 16 aa, Artificial Sequence
  Synthetically generated peptide
  VARIANT (1)..(16): Xaa = Any Amino Acid
CCEWCCNPXACTGXXC

SEQ ID NO: 4738 - protein, 17 aa, Artificial Sequence
  Synthetically generated peptide
  VARIANT (1)..(17): Xaa = Any Amino Acid
CCEWCCNPXACTGXXXC

SEQ ID NO: 4739 - protein, 14 aa, Artificial Sequence
  Synthetically generated peptide
  VARIANT (1)..(14): Xaa = Any Amino Acid
CCEWCCNPAXCTGC

SEQ ID NO: 4740 - protein, 15 aa, Artificial Sequence
  Synthetically generated peptide
  VARIANT (1)..(15): Xaa = Any Amino Acid
CCEWCCNPAXXCTGC

SEQ ID NO: 4741 - protein, 16 aa, Artificial Sequence
  Synthetically generated peptide
  VARIANT (1)..(16): Xaa = Any Amino Acid
CCEWCCNPAXXXCTGC

SEQ ID NO: 4742 - protein, 17 aa, Artificial Sequence
  Synthetically generated peptide
  VARIANT (1)..(17): Xaa = Any Amino Acid
CCEWCCNPAXXXXCTGC

SEQ ID NO: 4743 - protein, 17 aa, Artificial Sequence
  Synthetically generated peptide
  VARIANT (1)..(17): Xaa = Any Amino Acid
CCEWCCNPAXXXCXTGC

SEQ ID NO: 4744 - protein, 17 aa, Artificial Sequence
  Synthetically generated peptide
  VARIANT (1)..(17): Xaa = Any Amino Acid
CCEWCCNPAXXXCTXGC

SEQ ID NO: 4745 - protein, 17 aa, Artificial Sequence
  Synthetically generated peptide
  VARIANT (1)..(17): Xaa = Any Amino Acid
CCEWCCNPAXXXCTGXC

SEQ ID NO: 4746 - protein, 16 aa, Artificial Sequence
  Synthetically generated peptide
  VARIANT (1)..(16): Xaa = Any Amino Acid
CCEWCCNPAXXCXTGC

SEQ ID NO: 4747 - protein, 17 aa, Artificial Sequence
  Synthetically generated peptide
  VARIANT (1)..(17): Xaa = Any Amino Acid
CCEWCCNPAXXCXXTGC

SEQ ID NO: 4748 - protein, 17 aa, Artificial Sequence
  Synthetically generated peptide
  VARIANT (1)..(17): Xaa = Any Amino Acid
CCEWCCNPAXXCXTXGC

SEQ ID NO: 4749 - protein, 17 aa, Artificial Sequence
  Synthetically generated peptide
  VARIANT (1)..(17): Xaa = Any Amino Acid
CCEWCCNPAXXCXTGXC

SEQ ID NO: 4750 - protein, 16 aa, Artificial Sequence
  Synthetically generated peptide
  VARIANT (1)..(16): Xaa = Any Amino Acid
CCEWCCNPAXXCTXGC

SEQ ID NO: 4751 - protein, 17 aa, Artificial Sequence
  Synthetically generated peptide
  VARIANT (1)..(17): Xaa = Any Amino Acid
CCEWCCNPAXXCTXXGC

SEQ ID NO: 4752 - protein, 17 aa, Artificial Sequence
  Synthetically generated peptide
  VARIANT (1)..(17): Xaa = Any Amino Acid
CCEWCCNPAXXCTXGXC

SEQ ID NO: 4753 - protein, 16 aa, Artificial Sequence
  Synthetically generated peptide
  VARIANT (1)..(16): Xaa = Any Amino Acid
CCEWCCNPAXXCTGXC

SEQ ID NO: 4754 - protein, 17 aa, Artificial Sequence
  Synthetically generated peptide
  VARIANT (1)..(17): Xaa = Any Amino Acid
CCEWCCNPAXXCTGXXC

SEQ ID NO: 4755 - protein, 15 aa, Artificial Sequence
  Synthetically generated peptide
  VARIANT (1)..(15): Xaa = Any Amino Acid
CCEWCCNPAXCXTGC

SEQ ID NO: 4756 - protein, 16 aa, Artificial Sequence
  Synthetically generated peptide
  VARIANT (1)..(16): Xaa = Any Amino Acid
CCEWCCNPAXCXXTGC

SEQ ID NO: 4757 - protein, 17 aa, Artificial Sequence
  Synthetically generated peptide
  VARIANT (1)..(17): Xaa = Any Amino Acid
CCEWCCNPAXCXXXTGC

SEQ ID NO: 4758 - protein, 17 aa, Artificial Sequence
  Synthetically generated peptide
  VARIANT (1)..(17): Xaa = Any Amino Acid
CCEWCCNPAXCXXTXGC

SEQ ID NO: 4759 - protein, 17 aa, Artificial Sequence
  Synthetically generated peptide
  VARIANT (1)..(17): Xaa = Any Amino Acid
CCEWCCNPAXCXXTGXC

SEQ ID NO: 4760 - protein, 16 aa, Artificial Sequence
  Synthetically generated peptide
  VARIANT (1)..(16): Xaa = Any Amino Acid
CCEWCCNPAXCXTXGC

SEQ ID NO: 4761 - protein, 17 aa, Artificial Sequence
  Synthetically generated peptide
  VARIANT (1)..(17): Xaa = Any Amino Acid
CCEWCCNPAXCXTXXGC

SEQ ID NO: 4762 - protein, 17 aa, Artificial Sequence
  Synthetically generated peptide
  VARIANT (1)..(17): Xaa = Any Amino Acid
CCEWCCNPAXCXTXGXC

SEQ ID NO: 4763 - protein, 16 aa, Artificial Sequence
  Synthetically generated peptide
  VARIANT (1)..(16): Xaa = Any Amino Acid
CCEWCCNPAXCXTGXC

SEQ ID NO: 4764 - protein, 17 aa, Artificial Sequence
  Synthetically generated peptide
  VARIANT (1)..(17): Xaa = Any Amino Acid
CCEWCCNPAXCXTGXXC

SEQ ID NO: 4765 - protein, 15 aa, Artificial Sequence
  Synthetically generated peptide
  VARIANT (1)..(15): Xaa = Any Amino Acid
CCEWCCNPAXCTXGC

SEQ ID NO: 4766 - protein, 16 aa, Artificial Sequence
  Synthetically generated peptide
  VARIANT (1)..(16): Xaa = Any Amino Acid
CCEWCCNPAXCTXXGC

SEQ ID NO: 4767 - protein, 17 aa, Artificial Sequence
  Synthetically generated peptide
  VARIANT (1)..(17): Xaa = Any Amino Acid
CCEWCCNPAXCTXXXGC

SEQ ID NO: 4768 - protein, 17 aa, Artificial Sequence
  Synthetically generated peptide
  VARIANT (1)..(17): Xaa = Any Amino Acid
CCEWCCNPAXCTXXGXC

SEQ ID NO: 4769 - protein, 16 aa, Artificial Sequence
  Synthetically generated peptide
  VARIANT (1)..(16): Xaa = Any Amino Acid
CCEWCCNPAXCTXGXC

SEQ ID NO: 4770 - protein, 17 aa, Artificial Sequence
  Synthetically generated peptide
  VARIANT (1)..(17): Xaa = Any Amino Acid
CCEWCCNPAXCTXGXXC

SEQ ID NO: 4771 - protein, 15 aa, Artificial Sequence
  Synthetically generated peptide
  VARIANT (1)..(15): Xaa = Any Amino Acid
CCEWCCNPAXCTGXC

SEQ ID NO: 4772 - protein, 16 aa, Artificial Sequence
  Synthetically generated peptide
  VARIANT (1)..(16): Xaa = Any Amino Acid
CCEWCCNPAXCTGXXC

SEQ ID NO: 4773 - protein, 17 aa, Artificial Sequence
  Synthetically generated peptide
  VARIANT (1)..(17): Xaa = Any Amino Acid
CCEWCCNPAXCTGXXXC

SEQ ID NO: 4774 - protein, 14 aa, Artificial Sequence
  Synthetically generated peptide
  VARIANT (1)..(14): Xaa = Any Amino Acid
CCEWCCNPACXTGC

SEQ ID NO: 4775 - protein, 15 aa, Artificial Sequence
  Synthetically generated peptide
  VARIANT (1)..(15): Xaa = Any Amino Acid
CCEWCCNPACXXTGC

SEQ ID NO: 4776 - protein, 16 aa, Artificial Sequence
  Synthetically generated peptide
  VARIANT (1)..(16): Xaa = Any Amino Acid
CCEWCCNPACXXXTGC

SEQ ID NO: 4777 - protein, 17 aa, Artificial Sequence
  Synthetically generated peptide
  VARIANT (1)..(17): Xaa = Any Amino Acid
CCEWCCNPACXXXXTGC

SEQ ID NO: 4778 - protein, 17 aa, Artificial Sequence
  Synthetically generated peptide
  VARIANT (1)..(17): Xaa = Any Amino Acid
CCEWCCNPACXXXTXGC

SEQ ID NO: 4779 - protein, 17 aa, Artificial Sequence
  Synthetically generated peptide
  VARIANT (1)..(17): Xaa = Any Amino Acid
CCEWCCNPACXXXTGXC

SEQ ID NO: 4780 - protein, 16 aa, Artificial Sequence
  Synthetically generated peptide
  VARIANT (1)..(16): Xaa = Any Amino Acid
CCEWCCNPACXXTXGC

SEQ ID NO: 4781 - protein, 17 aa, Artificial Sequence
  Synthetically generated peptide
  VARIANT (1)..(17): Xaa = Any Amino Acid
CCEWCCNPACXXTXXGC

SEQ ID NO: 4782 - protein, 17 aa, Artificial Sequence
  Synthetically generated peptide
  VARIANT (1)..(17): Xaa = Any Amino Acid
CCEWCCNPACXXTXGXC

SEQ ID NO: 4783 - protein, 16 aa, Artificial Sequence
  Synthetically generated peptide
  VARIANT (1)..(16): Xaa = Any Amino Acid
CCEWCCNPACXXTGXC

SEQ ID NO: 4784 - protein, 17 aa, Artificial Sequence
  Synthetically generated peptide
  VARIANT (1)..(17): Xaa = Any Amino Acid
CCEWCCNPACXXTGXXC

SEQ ID NO: 4785 - protein, 15 aa, Artificial Sequence
  Synthetically generated peptide
  VARIANT (1)..(15): Xaa = Any Amino Acid
CCEWCCNPACXTXGC

SEQ ID NO: 4786 - protein, 16 aa, Artificial Sequence
  Synthetically generated peptide
  VARIANT (1)..(16): Xaa = Any Amino Acid
CCEWCCNPACXTXXGC

SEQ ID NO: 4787 - protein, 17 aa, Artificial Sequence
  Synthetically generated peptide
  VARIANT (1)..(17): Xaa = Any Amino Acid
CCEWCCNPACXTXXXGC

SEQ ID NO: 4788 - protein, 17 aa, Artificial Sequence
  Synthetically generated peptide
  VARIANT (1)..(17): Xaa = Any Amino Acid
CCEWCCNPACXTXXGXC

SEQ ID NO: 4789 - protein, 16 aa, Artificial Sequence
  Synthetically generated peptide
  VARIANT (1)..(16): Xaa = Any Amino Acid
CCEWCCNPACXTXGXC

SEQ ID NO: 4790 - protein, 17 aa, Artificial Sequence
  Synthetically generated peptide
  VARIANT (1)..(17): Xaa = Any Amino Acid
CCEWCCNPACXTXGXXC

SEQ ID NO: 4791 - protein, 15 aa, Artificial Sequence
  Synthetically generated peptide
  VARIANT (1)..(15): Xaa = Any Amino Acid
CCEWCCNPACXTGXC

SEQ ID NO: 4792 - protein, 16 aa, Artificial Sequence
  Synthetically generated peptide
  VARIANT (1)..(16): Xaa = Any Amino Acid
CCEWCCNPACXTGXXC

SEQ ID NO: 4793 - protein, 17 aa, Artificial Sequence
  Synthetically generated peptide
  VARIANT (1)..(17): Xaa = Any Amino Acid
CCEWCCNPACXTGXXXC

SEQ ID NO: 4794 - protein, 14 aa, Artificial Sequence
  Synthetically generated peptide
  VARIANT (1)..(14): Xaa = Any Amino Acid
CCEWCCNPACTXGC

SEQ ID NO: 4795 - protein, 15 aa, Artificial Sequence
  Synthetically generated peptide
  VARIANT (1)..(15): Xaa = Any Amino Acid
CCEWCCNPACTXXGC

SEQ ID NO: 4796 - protein, 16 aa, Artificial Sequence
  Synthetically generated peptide
  VARIANT (1)..(16): Xaa = Any Amino Acid
CCEWCCNPACTXXXGC

SEQ ID NO: 4797 - protein, 17 aa, Artificial Sequence
  Synthetically generated peptide
  VARIANT (1)..(17): Xaa = Any Amino Acid
CCEWCCNPACTXXXXGC

SEQ ID NO: 4798 - protein, 17 aa, Artificial Sequence
  Synthetically generated peptide
  VARIANT (1)..(17): Xaa = Any Amino Acid
CCEWCCNPACTXXXGXC

SEQ ID NO: 4799 - protein, 16 aa, Artificial Sequence
  Synthetically generated peptide
  VARIANT (1)..(16): Xaa = Any Amino Acid
CCEWCCNPACTXXGXC

SEQ ID NO: 4800 - protein, 17 aa, Artificial Sequence
  Synthetically generated peptide
  VARIANT (1)..(17): Xaa = Any Amino Acid
CCEWCCNPACTXXGXXC

SEQ ID NO: 4801 - protein, 15 aa, Artificial Sequence
  Synthetically generated peptide
  VARIANT (1)..(15): Xaa = Any Amino Acid
CCEWCCNPACTXGXC

SEQ ID NO: 4802 - protein, 16 aa, Artificial Sequence
  Synthetically generated peptide
  VARIANT (1)..(16): Xaa = Any Amino Acid
CCEWCCNPACTXGXXC

SEQ ID NO: 4803 - protein, 17 aa, Artificial Sequence
  Synthetically generated peptide
  VARIANT (1)..(17): Xaa = Any Amino Acid
CCEWCCNPACTXGXXXC

SEQ ID NO: 4804 - protein, 14 aa, Artificial Sequence
  Synthetically generated peptide
  VARIANT (1)..(14): Xaa = Any Amino Acid
CCEWCCNPACTGXC

SEQ ID NO: 4805 - protein, 15 aa, Artificial Sequence
  Synthetically generated peptide
  VARIANT (1)..(15): Xaa = Any Amino Acid
CCEWCCNPACTGXXC

SEQ ID NO: 4806 - protein, 16 aa, Artificial Sequence
  Synthetically generated peptide
  VARIANT (1)..(16): Xaa = Any Amino Acid
CCEWCCNPACTGXXXC

SEQ ID NO: 4807 - protein, 17 aa, Artificial Sequence
  Synthetically generated peptide
  VARIANT (1)..(17): Xaa = Any Amino Acid
CCEWCCNPACTGXXXXC

SEQ ID NO: 4808 - protein, 14 aa, Artificial Sequence
  Synthetically generated peptide
  VARIANT (1)..(14): Xaa = Any Amino Acid
CCXEFCCNPACTGC

SEQ ID NO: 4809 - protein, 15 aa, Artificial Sequence
  Synthetically generated peptide
  VARIANT (1)..(15): Xaa = Any Amino Acid
CCXXEFCCNPACTGC

SEQ ID NO: 4810 - protein, 16 aa, Artificial Sequence
  Synthetically generated peptide
  VARIANT (1)..(16): Xaa = Any Amino Acid
CCXXXEFCCNPACTGC

SEQ ID NO: 4811 - protein, 17 aa, Artificial Sequence
  Synthetically generated peptide
  VARIANT (1)..(17): Xaa = Any Amino Acid
CCXXXXEFCCNPACTGC

SEQ ID NO: 4812 - protein, 17 aa, Artificial Sequence
  Synthetically generated peptide
  VARIANT (1)..(17): Xaa = Any Amino Acid
CCXXXEXFCCNPACTGC

SEQ ID NO: 4813 - protein, 17 aa, Artificial Sequence
  Synthetically generated peptide
  VARIANT (1)..(17): Xaa = Any Amino Acid
CCXXXEFXCCNPACTGC

SEQ ID NO: 4814 - protein, 17 aa, Artificial Sequence
  Synthetically generated peptide
  VARIANT (1)..(17): Xaa = Any Amino Acid
CCXXXEFCCXNPACTGC

SEQ ID NO: 4815 - protein, 17 aa, Artificial Sequence
  Synthetically generated peptide
  VARIANT (1)..(17): Xaa = Any Amino Acid
CCXXXEFCCNXPACTGC

SEQ ID NO: 4816 - protein, 17 aa, Artificial Sequence
  Synthetically generated peptide
  VARIANT (1)..(17): Xaa = Any Amino Acid
CCXXXEFCCNPXACTGC

SEQ ID NO: 4817 - protein, 17 aa, Artificial Sequence
  Synthetically generated peptide
  VARIANT (1)..(17): Xaa = Any Amino Acid
CCXXXEFCCNPAXCTGC

SEQ ID NO: 4818 - protein, 17 aa, Artificial Sequence
  Synthetically generated peptide
  VARIANT (1)..(17): Xaa = Any Amino Acid
CCXXXEFCCNPACXTGC

SEQ ID NO: 4819 - protein, 17 aa, Artificial Sequence
  Synthetically generated peptide
  VARIANT (1)..(17): Xaa = Any Amino Acid
CCXXXEFCCNPACTXGC

SEQ ID NO: 4820 - protein, 17 aa, Artificial Sequence
  Synthetically generated peptide
  VARIANT (1)..(17): Xaa = Any Amino Acid
CCXXXEFCCNPACTGXC

SEQ ID NO: 4821 - protein, 16 aa, Artificial Sequence
  Synthetically generated peptide
  VARIANT (1)..(16): Xaa = Any Amino Acid
CCXXEXFCCNPACTGC

SEQ ID NO: 4822 - protein, 17 aa, Artificial Sequence
  Synthetically generated peptide
  VARIANT (1)..(17): Xaa = Any Amino Acid
CCXXEXXFCCNPACTGC

SEQ ID NO: 4823 - protein, 17 aa, Artificial Sequence
  Synthetically generated peptide
  VARIANT (1)..(17): Xaa = Any Amino Acid
CCXXEXFXCCNPACTGC

SEQ ID NO: 4824 - protein, 17 aa, Artificial Sequence
  Synthetically generated peptide
  VARIANT (1)..(17): Xaa = Any Amino Acid
CCXXEXFCCXNPACTGC

SEQ ID NO: 4825 - protein, 17 aa, Artificial Sequence
  Synthetically generated peptide
  VARIANT (1)..(17): Xaa = Any Amino Acid
CCXXEXFCCNXPACTGC

SEQ ID NO: 4826 - protein, 17 aa, Artificial Sequence
  Synthetically generated peptide
  VARIANT (1)..(17): Xaa = Any Amino Acid
CCXXEXFCCNPXACTGC

SEQ ID NO: 4827 - protein, 17 aa, Artificial Sequence
  Synthetically generated peptide
  VARIANT (1)..(17): Xaa = Any Amino Acid
CCXXEXFCCNPAXCTGC

SEQ ID NO: 4828 - protein, 17 aa, Artificial Sequence
  Synthetically generated peptide
  VARIANT (1)..(17): Xaa = Any Amino Acid
CCXXEXFCCNPACXTGC

SEQ ID NO: 4829 - protein, 17 aa, Artificial Sequence
  Synthetically generated peptide
  VARIANT (1)..(17): Xaa = Any Amino Acid
CCXXEXFCCNPACTXGC

SEQ ID NO: 4830 - protein, 17 aa, Artificial Sequence
  Synthetically generated peptide
  VARIANT (1)..(17): Xaa = Any Amino Acid
CCXXEXFCCNPACTGXC

SEQ ID NO: 4831 - protein, 16 aa, Artificial Sequence
  Synthetically generated peptide
  VARIANT (1)..(16): Xaa = Any Amino Acid
CCXXEFXCCNPACTGC

SEQ ID NO: 4832 - protein, 17 aa, Artificial Sequence
  Synthetically generated peptide
  VARIANT (1)..(17): Xaa = Any Amino Acid
CCXXEFXXCCNPACTGC

SEQ ID NO: 4833 - protein, 17 aa, Artificial Sequence
  Synthetically generated peptide
  VARIANT (1)..(17): Xaa = Any Amino Acid
CCXXEFXCCXNPACTGC

SEQ ID NO: 4834 - protein, 17 aa, Artificial Sequence
  Synthetically generated peptide
  VARIANT (1)..(17): Xaa = Any Amino Acid
CCXXEFXCCNXPACTGC

SEQ ID NO: 4835 - protein, 17 aa, Artificial Sequence
  Synthetically generated peptide
  VARIANT (1)..(17): Xaa = Any Amino Acid
CCXXEFXCCNPXACTGC

SEQ ID NO: 4836 - protein, 17 aa, Artificial Sequence
  Synthetically generated peptide
  VARIANT (1)..(17): Xaa = Any Amino Acid
CCXXEFXCCNPAXCTGC

SEQ ID NO: 4837 - protein, 17 aa, Artificial Sequence
  Synthetically generated peptide
  VARIANT (1)..(17): Xaa = Any Amino Acid
CCXXEFXCCNPACXTGC

SEQ ID NO: 4838 - protein, 17 aa, Artificial Sequence
  Synthetically generated peptide
  VARIANT (1)..(17): Xaa = Any Amino Acid
CCXXEFXCCNPACTXGC

SEQ ID NO: 4839 - protein, 17 aa, Artificial Sequence
  Synthetically generated peptide
  VARIANT (1)..(17): Xaa = Any Amino Acid
CCXXEFXCCNPACTGXC

SEQ ID NO: 4840 - protein, 16 aa, Artificial Sequence
  Synthetically generated peptide
  VARIANT (1)..(16): Xaa = Any Amino Acid
CCXXEFCCXNPACTGC

SEQ ID NO: 4841 - protein, 17 aa, Artificial Sequence
  Synthetically generated peptide
  VARIANT (1)..(17): Xaa = Any Amino Acid
CCXXEFCCXXNPACTGC

SEQ ID NO: 4842 - protein, 17 aa, Artificial Sequence
  Synthetically generated peptide
  VARIANT (1)..(17): Xaa = Any Amino Acid
CCXXEFCCXNXPACTGC

SEQ ID NO: 4843 - protein, 17 aa, Artificial Sequence
  Synthetically generated peptide
  VARIANT (1)..(17): Xaa = Any Amino Acid
CCXXEFCCXNPXACTGC

SEQ ID NO: 4844 - protein, 17 aa, Artificial Sequence
  Synthetically generated peptide
  VARIANT (1)..(17): Xaa = Any Amino Acid
CCXXEFCCXNPAXCTGC

SEQ ID NO: 4845 - protein, 17 aa, Artificial Sequence
  Synthetically generated peptide
  VARIANT (1)..(17): Xaa = Any Amino Acid
CCXXEFCCXNPACXTGC

SEQ ID NO: 4846 - protein, 17 aa, Artificial Sequence
  Synthetically generated peptide
  VARIANT (1)..(17): Xaa = Any Amino Acid
CCXXEFCCXNPACTXGC

SEQ ID NO: 4847 - protein, 17 aa, Artificial Sequence
  Synthetically generated peptide
  VARIANT (1)..(17): Xaa = Any Amino Acid
CCXXEFCCXNPACTGXC

SEQ ID NO: 4848 - protein, 16 aa, Artificial Sequence
  Synthetically generated peptide
  VARIANT (1)..(16): Xaa = Any Amino Acid
CCXXEFCCNXPACTGC

SEQ ID NO: 4849 - protein, 17 aa, Artificial Sequence
  Synthetically generated peptide
  VARIANT (1)..(17): Xaa = Any Amino Acid
CCXXEFCCNXXPACTGC

SEQ ID NO: 4850 - protein, 17 aa, Artificial Sequence
  Synthetically generated peptide
  VARIANT (1)..(17): Xaa = Any Amino Acid
CCXXEFCCNXPXACTGC

SEQ ID NO: 4851 - protein, 17 aa, Artificial Sequence
  Synthetically generated peptide
  VARIANT (1)..(17): Xaa = Any Amino Acid
CCXXEFCCNXPAXCTGC

SEQ ID NO: 4852 - protein, 17 aa, Artificial Sequence
  Synthetically generated peptide
  VARIANT (1)..(17): Xaa = Any Amino Acid
CCXXEFCCNXPACXTGC

SEQ ID NO: 4853 - protein, 17 aa, Artificial Sequence
  Synthetically generated peptide
  VARIANT (1)..(17): Xaa = Any Amino Acid
CCXXEFCCNXPACTXGC

SEQ ID NO: 4854 - protein, 17 aa, Artificial Sequence
  Synthetically generated peptide
  VARIANT (1)..(17): Xaa = Any Amino Acid
CCXXEFCCNXPACTGXC

SEQ ID NO: 4855 - protein, 16 aa, Artificial Sequence
  Synthetically generated peptide
  VARIANT (1)..(16): Xaa = Any Amino Acid
CCXXEFCCNPXACTGC

SEQ ID NO: 4856 - protein, 17 aa, Artificial Sequence
  Synthetically generated peptide
  VARIANT (1)..(17): Xaa = Any Amino Acid
CCXXEFCCNPXXACTGC

SEQ ID NO: 4857 - protein, 17 aa, Artificial Sequence
  Synthetically generated peptide
  VARIANT (1)..(17): Xaa = Any Amino Acid
CCXXEFCCNPXAXCTGC

SEQ ID NO: 4858 - protein, 17 aa, Artificial Sequence
  Synthetically generated peptide
  VARIANT (1)..(17): Xaa = Any Amino Acid
CCXXEFCCNPXACXTGC

SEQ ID NO: 4859 - protein, 17 aa, Artificial Sequence
  Synthetically generated peptide
  VARIANT (1)..(17): Xaa = Any Amino Acid
CCXXEFCCNPXACTXGC

SEQ ID NO: 4860 - protein, 17 aa, Artificial Sequence
  Synthetically generated peptide
  VARIANT (1)..(17): Xaa = Any Amino Acid
CCXXEFCCNPXACTGXC

SEQ ID NO: 4861 - protein, 16 aa, Artificial Sequence
  Synthetically generated peptide
  VARIANT (1)..(16): Xaa = Any Amino Acid
CCXXEFCCNPAXCTGC

SEQ ID NO: 4862 - protein, 17 aa, Artificial Sequence
  Synthetically generated peptide
  VARIANT (1)..(17): Xaa = Any Amino Acid
CCXXEFCCNPAXXCTGC

SEQ ID NO: 4863 - protein, 17 aa, Artificial Sequence
  Synthetically generated peptide
  VARIANT (1)..(17): Xaa = Any Amino Acid
CCXXEFCCNPAXCXTGC

SEQ ID NO: 4864 - protein, 17 aa, Artificial Sequence
  Synthetically generated peptide
  VARIANT (1)..(17): Xaa = Any Amino Acid
CCXXEFCCNPAXCTXGC

SEQ ID NO: 4865 - protein, 17 aa, Artificial Sequence
  Synthetically generated peptide
  VARIANT (1)..(17): Xaa = Any Amino Acid
CCXXEFCCNPAXCTGXC

SEQ ID NO: 4866 - protein, 16 aa, Artificial Sequence
  Synthetically generated peptide
  VARIANT (1)..(16): Xaa = Any Amino Acid
CCXXEFCCNPACXTGC

SEQ ID NO: 4867 - protein, 17 aa, Artificial Sequence
  Synthetically generated peptide
  VARIANT (1)..(17): Xaa = Any Amino Acid
CCXXEFCCNPACXXTGC

SEQ ID NO: 4868 - protein, 17 aa, Artificial Sequence
  Synthetically generated peptide
  VARIANT (1)..(17): Xaa = Any Amino Acid
CCXXEFCCNPACXTXGC

SEQ ID NO: 4869 - protein, 17 aa, Artificial Sequence
  Synthetically generated peptide
  VARIANT (1)..(17): Xaa = Any Amino Acid
CCXXEFCCNPACXTGXC

SEQ ID NO: 4870 - protein, 16 aa, Artificial Sequence
  Synthetically generated peptide
  VARIANT (1)..(16): Xaa = Any Amino Acid
CCXXEFCCNPACTXGC

SEQ ID NO: 4871 - protein, 17 aa, Artificial Sequence
  Synthetically generated peptide
  VARIANT (1)..(17): Xaa = Any Amino Acid
CCXXEFCCNPACTXXGC

SEQ ID NO: 4872 - protein, 17 aa, Artificial Sequence
  Synthetically generated peptide
  VARIANT (1)..(17): Xaa = Any Amino Acid
CCXXEFCCNPACTXGXC

SEQ ID NO: 4873 - protein, 16 aa, Artificial Sequence
  Synthetically generated peptide
  VARIANT (1)..(16): Xaa = Any Amino Acid
CCXXEFCCNPACTGXC

SEQ ID NO: 4874 - protein, 17 aa, Artificial Sequence
  Synthetically generated peptide
  VARIANT (1)..(17): Xaa = Any Amino Acid
CCXXEFCCNPACTGXXC

SEQ ID NO: 4875 - protein, 15 aa, Artificial Sequence
  Synthetically generated peptide
  VARIANT (1)..(15): Xaa = Any Amino Acid
CCXEXFCCNPACTGC

SEQ ID NO: 4876 - protein, 16 aa, Artificial Sequence
  Synthetically generated peptide
  VARIANT (1)..(16): Xaa = Any Amino Acid
CCXEXXFCCNPACTGC

SEQ ID NO: 4877 - protein, 17 aa, Artificial Sequence
  Synthetically generated peptide
  VARIANT (1)..(17): Xaa = Any Amino Acid
CCXEXXXFCCNPACTGC

SEQ ID NO: 4878 - protein, 17 aa, Artificial Sequence
  Synthetically generated peptide
  VARIANT (1)..(17): Xaa = Any Amino Acid
CCXEXXFXCCNPACTGC

SEQ ID NO: 4879 - protein, 17 aa, Artificial Sequence
  Synthetically generated peptide
  VARIANT (1)..(17): Xaa = Any Amino Acid
CCXEXXFCCXNPACTGC

SEQ ID NO: 4880 - protein, 17 aa, Artificial Sequence
  Synthetically generated peptide
  VARIANT (1)..(17): Xaa = Any Amino Acid
CCXEXXFCCNXPACTGC

SEQ ID NO: 4881 - protein, 17 aa, Artificial Sequence
  Synthetically generated peptide
  VARIANT (1)..(17): Xaa = Any Amino Acid
CCXEXXFCCNPXACTGC

SEQ ID NO: 4882 - protein, 17 aa, Artificial Sequence
  Synthetically generated peptide
  VARIANT (1)..(17): Xaa = Any Amino Acid
CCXEXXFCCNPAXCTGC

SEQ ID NO: 4883 - protein, 17 aa, Artificial Sequence
  Synthetically generated peptide
  VARIANT (1)..(17): Xaa = Any Amino Acid
CCXEXXFCCNPACXTGC

SEQ ID NO: 4884 - protein, 17 aa, Artificial Sequence
  Synthetically generated peptide
  VARIANT (1)..(17): Xaa = Any Amino Acid
CCXEXXFCCNPACTXGC

SEQ ID NO: 4885 - protein, 17 aa, Artificial Sequence
  Synthetically generated peptide
  VARIANT (1)..(17): Xaa = Any Amino Acid
CCXEXXFCCNPACTGXC

SEQ ID NO: 4886 - protein, 16 aa, Artificial Sequence
  Synthetically generated peptide
  VARIANT (1)..(16): Xaa = Any Amino Acid
CCXEXFXCCNPACTGC

SEQ ID NO: 4887 - protein, 17 aa, Artificial Sequence
  Synthetically generated peptide
  VARIANT (1)..(17): Xaa = Any Amino Acid
CCXEXFXXCCNPACTGC

SEQ ID NO: 4888 - protein, 17 aa, Artificial Sequence
  Synthetically generated peptide
  VARIANT (1)..(17): Xaa = Any Amino Acid
CCXEXFXCCXNPACTGC

SEQ ID NO: 4889 - protein, 17 aa, Artificial Sequence
  Synthetically generated peptide
  VARIANT (1)..(17): Xaa = Any Amino Acid
CCXEXFXCCNXPACTGC

SEQ ID NO: 4890 - protein, 17 aa, Artificial Sequence
  Synthetically generated peptide
  VARIANT (1)..(17): Xaa = Any Amino Acid
CCXEXFXCCNPXACTGC

SEQ ID NO: 4891 - protein, 17 aa, Artificial Sequence
  Synthetically generated peptide
  VARIANT (1)..(17): Xaa = Any Amino Acid
CCXEXFXCCNPAXCTGC

SEQ ID NO: 4892 - protein, 17 aa, Artificial Sequence
  Synthetically generated peptide
  VARIANT (1)..(17): Xaa = Any Amino Acid
CCXEXFXCCNPACXTGC

SEQ ID NO: 4893 - protein, 17 aa, Artificial Sequence
  Synthetically generated peptide
  VARIANT (1)..(17): Xaa = Any Amino Acid
CCXEXFXCCNPACTXGC

SEQ ID NO: 4894 - protein, 17 aa, Artificial Sequence
  Synthetically generated peptide
  VARIANT (1)..(17): Xaa = Any Amino Acid
CCXEXFXCCNPACTGXC

SEQ ID NO: 4895 - protein, 16 aa, Artificial Sequence
  Synthetically generated peptide
  VARIANT (1)..(16): Xaa = Any Amino Acid
CCXEXFCCXNPACTGC

SEQ ID NO: 4896 - protein, 17 aa, Artificial Sequence
  Synthetically generated peptide
  VARIANT (1)..(17): Xaa = Any Amino Acid
CCXEXFCCXXNPACTGC

SEQ ID NO: 4897 - protein, 17 aa, Artificial Sequence
  Synthetically generated peptide
  VARIANT (1)..(17): Xaa = Any Amino Acid
CCXEXFCCXNXPACTGC

SEQ ID NO: 4898 - protein, 17 aa, Artificial Sequence
  Synthetically generated peptide
  VARIANT (1)..(17): Xaa = Any Amino Acid
CCXEXFCCXNPXACTGC

SEQ ID NO: 4899 - protein, 17 aa, Artificial Sequence
  Synthetically generated peptide
  VARIANT (1)..(17): Xaa = Any Amino Acid
CCXEXFCCXNPAXCTGC

SEQ ID NO: 4900 - protein, 17 aa, Artificial Sequence
  Synthetically generated peptide
  VARIANT (1)..(17): Xaa = Any Amino Acid
CCXEXFCCXNPACXTGC

SEQ ID NO: 4901 - protein, 17 aa, Artificial Sequence
  Synthetically generated peptide
  VARIANT (1)..(17): Xaa = Any Amino Acid
CCXEXFCCXNPACTXGC

SEQ ID NO: 4902 - protein, 17 aa, Artificial Sequence
  Synthetically generated peptide
  VARIANT (1)..(17): Xaa = Any Amino Acid
CCXEXFCCXNPACTGXC

SEQ ID NO: 4903 - protein, 16 aa, Artificial Sequence
  Synthetically generated peptide
  VARIANT (1)..(16): Xaa = Any Amino Acid
CCXEXFCCNXPACTGC

SEQ ID NO: 4904 - protein, 17 aa, Artificial Sequence
  Synthetically generated peptide
  VARIANT (1)..(17): Xaa = Any Amino Acid
CCXEXFCCNXXPACTGC

SEQ ID NO: 4905 - protein, 17 aa, Artificial Sequence
  Synthetically generated peptide
  VARIANT (1)..(17): Xaa = Any Amino Acid
CCXEXFCCNXPXACTGC

SEQ ID NO: 4906 - protein, 17 aa, Artificial Sequence
  Synthetically generated peptide
  VARIANT (1)..(17): Xaa = Any Amino Acid
CCXEXFCCNXPAXCTGC

SEQ ID NO: 4907 - protein, 17 aa, Artificial Sequence
  Synthetically generated peptide
  VARIANT (1)..(17): Xaa = Any Amino Acid
CCXEXFCCNXPACXTGC

SEQ ID NO: 4908 - protein, 17 aa, Artificial Sequence
  Synthetically generated peptide
  VARIANT (1)..(17): Xaa = Any Amino Acid
CCXEXFCCNXPACTXGC

SEQ ID NO: 4909 - protein, 17 aa, Artificial Sequence
  Synthetically generated peptide
  VARIANT (1)..(17): Xaa = Any Amino Acid
CCXEXFCCNXPACTGXC

SEQ ID NO: 4910 - protein, 16 aa, Artificial Sequence
  Synthetically generated peptide
  VARIANT (1)..(16): Xaa = Any Amino Acid
CCXEXFCCNPXACTGC

SEQ ID NO: 4911 - protein, 17 aa, Artificial Sequence
  Synthetically generated peptide
  VARIANT (1)..(17): Xaa = Any Amino Acid
CCXEXFCCNPXXACTGC

SEQ ID NO: 4912 - protein, 17 aa, Artificial Sequence
  Synthetically generated peptide
  VARIANT (1)..(17): Xaa = Any Amino Acid
CCXEXFCCNPXAXCTGC

SEQ ID NO: 4913 - protein, 17 aa, Artificial Sequence
  Synthetically generated peptide
  VARIANT (1)..(17): Xaa = Any Amino Acid
CCXEXFCCNPXACXTGC

SEQ ID NO: 4914 - protein, 17 aa, Artificial Sequence
  Synthetically generated peptide
  VARIANT (1)..(17): Xaa = Any Amino Acid
CCXEXFCCNPXACTXGC

SEQ ID NO: 4915 - protein, 17 aa, Artificial Sequence
  Synthetically generated peptide
  VARIANT (1)..(17): Xaa = Any Amino Acid
CCXEXFCCNPXACTGXC

SEQ ID NO: 4916 - protein, 16 aa, Artificial Sequence
  Synthetically generated peptide
  VARIANT (1)..(16): Xaa = Any Amino Acid
CCXEXFCCNPAXCTGC

SEQ ID NO: 4917 - protein, 17 aa, Artificial Sequence
  Synthetically generated peptide
  VARIANT (1)..(17): Xaa = Any Amino Acid
CCXEXFCCNPAXXCTGC

SEQ ID NO: 4918 - protein, 17 aa, Artificial Sequence
  Synthetically generated peptide
  VARIANT (1)..(17): Xaa = Any Amino Acid
CCXEXFCCNPAXCXTGC

SEQ ID NO: 4919 - protein, 17 aa, Artificial Sequence
  Synthetically generated peptide
  VARIANT (1)..(17): Xaa = Any Amino Acid
CCXEXFCCNPAXCTXGC

SEQ ID NO: 4920 - protein, 17 aa, Artificial Sequence
  Synthetically generated peptide
  VARIANT (1)..(17): Xaa = Any Amino Acid
CCXEXFCCNPAXCTGXC

SEQ ID NO: 4921 - protein, 16 aa, Artificial Sequence
  Synthetically generated peptide
  VARIANT (1)..(16): Xaa = Any Amino Acid
CCXEXFCCNPACXTGC

SEQ ID NO: 4922 - protein, 17 aa, Artificial Sequence
  Synthetically generated peptide
  VARIANT (1)..(17): Xaa = Any Amino Acid
CCXEXFCCNPACXXTGC

SEQ ID NO: 4923 - protein, 17 aa, Artificial Sequence
  Synthetically generated peptide
  VARIANT (1)..(17): Xaa = Any Amino Acid
CCXEXFCCNPACXTXGC

SEQ ID NO: 4924 - protein, 17 aa, Artificial Sequence
  Synthetically generated peptide
  VARIANT (1)..(17): Xaa = Any Amino Acid
CCXEXFCCNPACXTGXC

SEQ ID NO: 4925 - protein, 16 aa, Artificial Sequence
  Synthetically generated peptide
  VARIANT (1)..(16): Xaa = Any Amino Acid
CCXEXFCCNPACTXGC

SEQ ID NO: 4926 - protein, 17 aa, Artificial Sequence
  Synthetically generated peptide
  VARIANT (1)..(17): Xaa = Any Amino Acid
CCXEXFCCNPACTXXGC

SEQ ID NO: 4927 - protein, 17 aa, Artificial Sequence
  Synthetically generated peptide
  VARIANT (1)..(17): Xaa = Any Amino Acid
CCXEXFCCNPACTXGXC

SEQ ID NO: 4928 - protein, 16 aa, Artificial Sequence
  Synthetically generated peptide
  VARIANT (1)..(16): Xaa = Any Amino Acid
CCXEXFCCNPACTGXC

SEQ ID NO: 4929 - protein, 17 aa, Artificial Sequence
  Synthetically generated peptide
  VARIANT (1)..(17): Xaa = Any Amino Acid
CCXEXFCCNPACTGXXC

SEQ ID NO: 4930 - protein, 15 aa, Artificial Sequence
  Synthetically generated peptide
  VARIANT (1)..(15): Xaa = Any Amino Acid
CCXEFXCCNPACTGC

SEQ ID NO: 4931 - protein, 16 aa, Artificial Sequence
  Synthetically generated peptide
  VARIANT (1)..(16): Xaa = Any Amino Acid
CCXEFXXCCNPACTGC

SEQ ID NO: 4932 - protein, 17 aa, Artificial Sequence
  Synthetically generated peptide
  VARIANT (1)..(17): Xaa = Any Amino Acid
CCXEFXXXCCNPACTGC

SEQ ID NO: 4933 - protein, 17 aa, Artificial Sequence
  Synthetically generated peptide
  VARIANT (1)..(17): Xaa = Any Amino Acid
CCXEFXXCCXNPACTGC

SEQ ID NO: 4934 - protein, 17 aa, Artificial Sequence
  Synthetically generated peptide
  VARIANT (1)..(17): Xaa = Any Amino Acid
CCXEFXXCCNXPACTGC

SEQ ID NO: 4935 - protein, 17 aa, Artificial Sequence
  Synthetically generated peptide
  VARIANT (1)..(17): Xaa = Any Amino Acid
CCXEFXXCCNPXACTGC

SEQ ID NO: 4936 - protein, 17 aa, Artificial Sequence
  Synthetically generated peptide
  VARIANT (1)..(17): Xaa = Any Amino Acid
CCXEFXXCCNPAXCTGC

SEQ ID NO: 4937 - protein, 17 aa, Artificial Sequence
  Synthetically generated peptide
  VARIANT (1)..(17): Xaa = Any Amino Acid
CCXEFXXCCNPACXTGC

SEQ ID NO: 4938 - protein, 17 aa, Artificial Sequence
  Synthetically generated peptide
  VARIANT (1)..(17): Xaa = Any Amino Acid
CCXEFXXCCNPACTXGC

SEQ ID NO: 4939 - protein, 17 aa, Artificial Sequence
  Synthetically generated peptide
  VARIANT (1)..(17): Xaa = Any Amino Acid
CCXEFXXCCNPACTGXC

SEQ ID NO: 4940 - protein, 16 aa, Artificial Sequence
  Synthetically generated peptide
  VARIANT (1)..(16): Xaa = Any Amino Acid
CCXEFXCCXNPACTGC

SEQ ID NO: 4941 - protein, 17 aa, Artificial Sequence
  Synthetically generated peptide
  VARIANT (1)..(17): Xaa = Any Amino Acid
CCXEFXCCXXNPACTGC

SEQ ID NO: 4942 - protein, 17 aa, Artificial Sequence
  Synthetically generated peptide
  VARIANT (1)..(17): Xaa = Any Amino Acid
CCXEFXCCXNXPACTGC

SEQ ID NO: 4943 - protein, 17 aa, Artificial Sequence
  Synthetically generated peptide
  VARIANT (1)..(17): Xaa = Any Amino Acid
CCXEFXCCXNPXACTGC

SEQ ID NO: 4944 - protein, 17 aa, Artificial Sequence
  Synthetically generated peptide
  VARIANT (1)..(17): Xaa = Any Amino Acid
CCXEFXCCXNPAXCTGC

SEQ ID NO: 4945 - protein, 17 aa, Artificial Sequence
  Synthetically generated peptide
  VARIANT (1)..(17): Xaa = Any Amino Acid
CCXEFXCCXNPACXTGC

SEQ ID NO: 4946 - protein, 17 aa, Artificial Sequence
  Synthetically generated peptide
  VARIANT (1)..(17): Xaa = Any Amino Acid
CCXEFXCCXNPACTXGC

SEQ ID NO: 4947 - protein, 17 aa, Artificial Sequence
  Synthetically generated peptide
  VARIANT (1)..(17): Xaa = Any Amino Acid
CCXEFXCCXNPACTGXC

SEQ ID NO: 4948 - protein, 16 aa, Artificial Sequence
  Synthetically generated peptide
  VARIANT (1)..(16): Xaa = Any Amino Acid
CCXEFXCCNXPACTGC

SEQ ID NO: 4949 - protein, 17 aa, Artificial Sequence
  Synthetically generated peptide
  VARIANT (1)..(17): Xaa = Any Amino Acid
CCXEFXCCNXXPACTGC

SEQ ID NO: 4950 - protein, 17 aa, Artificial Sequence
  Synthetically generated peptide
  VARIANT (1)..(17): Xaa = Any Amino Acid
CCXEFXCCNXPXACTGC

SEQ ID NO: 4951 - protein, 17 aa, Artificial Sequence
  Synthetically generated peptide
  VARIANT (1)..(17): Xaa = Any Amino Acid
CCXEFXCCNXPAXCTGC

SEQ ID NO: 4952 - protein, 17 aa, Artificial Sequence
  Synthetically generated peptide
  VARIANT (1)..(17): Xaa = Any Amino Acid
CCXEFXCCNXPACXTGC

SEQ ID NO: 4953 - protein, 17 aa, Artificial Sequence
  Synthetically generated peptide
  VARIANT (1)..(17): Xaa = Any Amino Acid
CCXEFXCCNXPACTXGC

SEQ ID NO: 4954 - protein, 17 aa, Artificial Sequence
  Synthetically generated peptide
  VARIANT (1)..(17): Xaa = Any Amino Acid
CCXEFXCCNXPACTGXC

SEQ ID NO: 4955 - protein, 16 aa, Artificial Sequence
  Synthetically generated peptide
  VARIANT (1)..(16): Xaa = Any Amino Acid
CCXEFXCCNPXACTGC

SEQ ID NO: 4956 - protein, 17 aa, Artificial Sequence
  Synthetically generated peptide
  VARIANT (1)..(17): Xaa = Any Amino Acid
CCXEFXCCNPXXACTGC

SEQ ID NO: 4957 - protein, 17 aa, Artificial Sequence
  Synthetically generated peptide
  VARIANT (1)..(17): Xaa = Any Amino Acid
CCXEFXCCNPXAXCTGC

SEQ ID NO: 4958 - protein, 17 aa, Artificial Sequence
  Synthetically generated peptide
  VARIANT (1)..(17): Xaa = Any Amino Acid
CCXEFXCCNPXACXTGC

SEQ ID NO: 4959 - protein, 17 aa, Artificial Sequence
  Synthetically generated peptide
  VARIANT (1)..(17): Xaa = Any Amino Acid
CCXEFXCCNPXACTXGC

SEQ ID NO: 4960 - protein, 17 aa, Artificial Sequence
  Synthetically generated peptide
  VARIANT (1)..(17): Xaa = Any Amino Acid
CCXEFXCCNPXACTGXC

SEQ ID NO: 4961 - protein, 16 aa, Artificial Sequence
  Synthetically generated peptide
  VARIANT (1)..(16): Xaa = Any Amino Acid
CCXEFXCCNPAXCTGC

SEQ ID NO: 4962 - protein, 17 aa, Artificial Sequence
  Synthetically generated peptide
  VARIANT (1)..(17): Xaa = Any Amino Acid
CCXEFXCCNPAXXCTGC

SEQ ID NO: 4963 - protein, 17 aa, Artificial Sequence
  Synthetically generated peptide
  VARIANT (1)..(17): Xaa = Any Amino Acid
CCXEFXCCNPAXCXTGC

SEQ ID NO: 4964 - protein, 17 aa, Artificial Sequence
  Synthetically generated peptide
  VARIANT (1)..(17): Xaa = Any Amino Acid
CCXEFXCCNPAXCTXGC

SEQ ID NO: 4965 - protein, 17 aa, Artificial Sequence
  Synthetically generated peptide
  VARIANT (1)..(17): Xaa = Any Amino Acid
CCXEFXCCNPAXCTGXC

SEQ ID NO: 4966 - protein, 16 aa, Artificial Sequence
  Synthetically generated peptide
  VARIANT (1)..(16): Xaa = Any Amino Acid
CCXEFXCCNPACXTGC

SEQ ID NO: 4967 - protein, 17 aa, Artificial Sequence
  Synthetically generated peptide
  VARIANT (1)..(17): Xaa = Any Amino Acid
CCXEFXCCNPACXXTGC

SEQ ID NO: 4968 - protein, 17 aa, Artificial Sequence
  Synthetically generated peptide
  VARIANT (1)..(17): Xaa = Any Amino Acid
CCXEFXCCNPACXTXGC

SEQ ID NO: 4969 - protein, 17 aa, Artificial Sequence
  Synthetically generated peptide
  VARIANT (1)..(17): Xaa = Any Amino Acid
CCXEFXCCNPACXTGXC

SEQ ID NO: 4970 - protein, 16 aa, Artificial Sequence
  Synthetically generated peptide
  VARIANT (1)..(16): Xaa = Any Amino Acid
CCXEFXCCNPACTXGC

SEQ ID NO: 4971 - protein, 17 aa, Artificial Sequence
  Synthetically generated peptide
  VARIANT (1)..(17): Xaa = Any Amino Acid
CCXEFXCCNPACTXXGC

SEQ ID NO: 4972 - protein, 17 aa, Artificial Sequence
  Synthetically generated peptide
  VARIANT (1)..(17): Xaa = Any Amino Acid
CCXEFXCCNPACTXGXC

SEQ ID NO: 4973 - protein, 16 aa, Artificial Sequence
  Synthetically generated peptide
  VARIANT (1)..(16): Xaa = Any Amino Acid
CCXEFXCCNPACTGXC

SEQ ID NO: 4974 - protein, 17 aa, Artificial Sequence
  Synthetically generated peptide
  VARIANT (1)..(17): Xaa = Any Amino Acid
CCXEFXCCNPACTGXXC

SEQ ID NO: 4975 - protein, 15 aa, Artificial Sequence
  Synthetically generated peptide
  VARIANT (1)..(15): Xaa = Any Amino Acid
CCXEFCCXNPACTGC

SEQ ID NO: 4976 - protein, 16 aa, Artificial Sequence
  Synthetically generated peptide
  VARIANT (1)..(16): Xaa = Any Amino Acid
CCXEFCCXXNPACTGC

SEQ ID NO: 4977 - protein, 17 aa, Artificial Sequence
  Synthetically generated peptide
  VARIANT (1)..(17): Xaa = Any Amino Acid
CCXEFCCXXXNPACTGC

SEQ ID NO: 4978 - protein, 17 aa, Artificial Sequence
  Synthetically generated peptide
  VARIANT (1)..(17): Xaa = Any Amino Acid
CCXEFCCXXNXPACTGC

SEQ ID NO: 4979 - protein, 17 aa, Artificial Sequence
  Synthetically generated peptide
  VARIANT (1)..(17): Xaa = Any Amino Acid
CCXEFCCXXNPXACTGC

SEQ ID NO: 4980 - protein, 17 aa, Artificial Sequence
  Synthetically generated peptide
  VARIANT (1)..(17): Xaa = Any Amino Acid
CCXEFCCXXNPAXCTGC

SEQ ID NO: 4981 - protein, 17 aa, Artificial Sequence
  Synthetically generated peptide
  VARIANT (1)..(17): Xaa = Any Amino Acid
CCXEFCCXXNPACXTGC

SEQ ID NO: 4982 - protein, 17 aa, Artificial Sequence
  Synthetically generated peptide
  VARIANT (1)..(17): Xaa = Any Amino Acid
CCXEFCCXXNPACTXGC

SEQ ID NO: 4983 - protein, 17 aa, Artificial Sequence
  Synthetically generated peptide
  VARIANT (1)..(17): Xaa = Any Amino Acid
CCXEFCCXXNPACTGXC

SEQ ID NO: 4984 - protein, 16 aa, Artificial Sequence
  Synthetically generated peptide
  VARIANT (1)..(16): Xaa = Any Amino Acid
CCXEFCCXNXPACTGC

SEQ ID NO: 4985 - protein, 17 aa, Artificial Sequence
  Synthetically generated peptide
  VARIANT (1)..(17): Xaa = Any Amino Acid
CCXEFCCXNXXPACTGC

SEQ ID NO: 4986 - protein, 17 aa, Artificial Sequence
  Synthetically generated peptide
  VARIANT (1)..(17): Xaa = Any Amino Acid
CCXEFCCXNXPXACTGC

SEQ ID NO: 4987 - protein, 17 aa, Artificial Sequence
  Synthetically generated peptide
  VARIANT (1)..(17): Xaa = Any Amino Acid
CCXEFCCXNXPAXCTGC

SEQ ID NO: 4988 - protein, 17 aa, Artificial Sequence
  Synthetically generated peptide
  VARIANT (1)..(17): Xaa = Any Amino Acid
CCXEFCCXNXPACXTGC

SEQ ID NO: 4989 - protein, 17 aa, Artificial Sequence
  Synthetically generated peptide
  VARIANT (1)..(17): Xaa = Any Amino Acid
CCXEFCCXNXPACTXGC

SEQ ID NO: 4990 - protein, 17 aa, Artificial Sequence
  Synthetically generated peptide
  VARIANT (1)..(17): Xaa = Any Amino Acid
CCXEFCCXNXPACTGXC

SEQ ID NO: 4991 - protein, 16 aa, Artificial Sequence
  Synthetically generated peptide
  VARIANT (1)..(16): Xaa = Any Amino Acid
CCXEFCCXNPXACTGC

SEQ ID NO: 4992 - protein, 17 aa, Artificial Sequence
  Synthetically generated peptide
  VARIANT (1)..(17): Xaa = Any Amino Acid
CCXEFCCXNPXXACTGC

SEQ ID NO: 4993 - protein, 17 aa, Artificial Sequence
  Synthetically generated peptide
  VARIANT (1)..(17): Xaa = Any Amino Acid
CCXEFCCXNPXAXCTGC

SEQ ID NO: 4994 - protein, 17 aa, Artificial Sequence
  Synthetically generated peptide
  VARIANT (1)..(17): Xaa = Any Amino Acid
CCXEFCCXNPXACXTGC

SEQ ID NO: 4995 - protein, 17 aa, Artificial Sequence
  Synthetically generated peptide
  VARIANT (1)..(17): Xaa = Any Amino Acid
CCXEFCCXNPXACTXGC

SEQ ID NO: 4996 - protein, 17 aa, Artificial Sequence
  Synthetically generated peptide
  VARIANT (1)..(17): Xaa = Any Amino Acid
CCXEFCCXNPXACTGXC

SEQ ID NO: 4997 - protein, 16 aa, Artificial Sequence
  Synthetically generated peptide
  VARIANT (1)..(16): Xaa = Any Amino Acid
CCXEFCCXNPAXCTGC

SEQ ID NO: 4998 - protein, 17 aa, Artificial Sequence
  Synthetically generated peptide
  VARIANT (1)..(17): Xaa = Any Amino Acid
CCXEFCCXNPAXXCTGC

SEQ ID NO: 4999 - protein, 17 aa, Artificial Sequence
  Synthetically generated peptide
  VARIANT (1)..(17): Xaa = Any Amino Acid
CCXEFCCXNPAXCXTGC

SEQ ID NO: 5000 - protein, 17 aa, Artificial Sequence
  Synthetically generated peptide
  VARIANT (1)..(17): Xaa = Any Amino Acid
CCXEFCCXNPAXCTXGC

SEQ ID NO: 5001 - protein, 17 aa, Artificial Sequence
  Synthetically generated peptide
  VARIANT (1)..(17): Xaa = Any Amino Acid
CCXEFCCXNPAXCTGXC

SEQ ID NO: 5002 - protein, 16 aa, Artificial Sequence
  Synthetically generated peptide
  VARIANT (1)..(16): Xaa = Any Amino Acid
CCXEFCCXNPACXTGC

SEQ ID NO: 5003 - protein, 17 aa, Artificial Sequence
  Synthetically generated peptide
  VARIANT (1)..(17): Xaa = Any Amino Acid
CCXEFCCXNPACXXTGC

SEQ ID NO: 5004 - protein, 17 aa, Artificial Sequence
  Synthetically generated peptide
  VARIANT (1)..(17): Xaa = Any Amino Acid
CCXEFCCXNPACXTXGC

SEQ ID NO: 5005 - protein, 17 aa, Artificial Sequence
  Synthetically generated peptide
  VARIANT (1)..(17): Xaa = Any Amino Acid
CCXEFCCXNPACXTGXC

SEQ ID NO: 5006 - protein, 16 aa, Artificial Sequence
  Synthetically generated peptide
  VARIANT (1)..(16): Xaa = Any Amino Acid
CCXEFCCXNPACTXGC

SEQ ID NO: 5007 - protein, 17 aa, Artificial Sequence
  Synthetically generated peptide
  VARIANT (1)..(17): Xaa = Any Amino Acid
CCXEFCCXNPACTXXGC

SEQ ID NO: 5008 - protein, 17 aa, Artificial Sequence
  Synthetically generated peptide
  VARIANT (1)..(17): Xaa = Any Amino Acid
CCXEFCCXNPACTXGXC

SEQ ID NO: 5009 - protein, 16 aa, Artificial Sequence
  Synthetically generated peptide
  VARIANT (1)..(16): Xaa = Any Amino Acid
CCXEFCCXNPACTGXC

SEQ ID NO: 5010 - protein, 17 aa, Artificial Sequence
  Synthetically generated peptide
  VARIANT (1)..(17): Xaa = Any Amino Acid
CCXEFCCXNPACTGXXC

SEQ ID NO: 5011 - protein, 15 aa, Artificial Sequence
  Synthetically generated peptide
  VARIANT (1)..(15): Xaa = Any Amino Acid
CCXEFCCNXPACTGC

SEQ ID NO: 5012 - protein, 16 aa, Artificial Sequence
  Synthetically generated peptide
  VARIANT (1)..(16): Xaa = Any Amino Acid
CCXEFCCNXXPACTGC

SEQ ID NO: 5013 - protein, 17 aa, Artificial Sequence
  Synthetically generated peptide
  VARIANT (1)..(17): Xaa = Any Amino Acid
CCXEFCCNXXXPACTGC

SEQ ID NO: 5014 - protein, 17 aa, Artificial Sequence
  Synthetically generated peptide
  VARIANT (1)..(17): Xaa = Any Amino Acid
CCXEFCCNXXPXACTGC

SEQ ID NO: 5015 - protein, 17 aa, Artificial Sequence
  Synthetically generated peptide
  VARIANT (1)..(17): Xaa = Any Amino Acid
CCXEFCCNXXPAXCTGC

SEQ ID NO: 5016 - protein, 17 aa, Artificial Sequence
  Synthetically generated peptide
  VARIANT (1)..(17): Xaa = Any Amino Acid
CCXEFCCNXXPACXTGC

SEQ ID NO: 5017 - protein, 17 aa, Artificial Sequence
  Synthetically generated peptide
  VARIANT (1)..(17): Xaa = Any Amino Acid
CCXEFCCNXXPACTXGC

SEQ ID NO: 5018 - protein, 17 aa, Artificial Sequence
  Synthetically generated peptide
  VARIANT (1)..(17): Xaa = Any Amino Acid
CCXEFCCNXXPACTGXC

SEQ ID NO: 5019 - protein, 16 aa, Artificial Sequence
  Synthetically generated peptide
  VARIANT (1)..(16): Xaa = Any Amino Acid
CCXEFCCNXPXACTGC

SEQ ID NO: 5020 - protein, 17 aa, Artificial Sequence
  Synthetically generated peptide
  VARIANT (1)..(17): Xaa = Any Amino Acid
CCXEFCCNXPXXACTGC

SEQ ID NO: 5021 - protein, 17 aa, Artificial Sequence
  Synthetically generated peptide
  VARIANT (1)..(17): Xaa = Any Amino Acid
CCXEFCCNXPXAXCTGC

SEQ ID NO: 5022 - protein, 17 aa, Artificial Sequence
  Synthetically generated peptide
  VARIANT (1)..(17): Xaa = Any Amino Acid
CCXEFCCNXPXACXTGC

SEQ ID NO: 5023 - protein, 17 aa, Artificial Sequence
  Synthetically generated peptide
  VARIANT (1)..(17): Xaa = Any Amino Acid
CCXEFCCNXPXACTXGC

SEQ ID NO: 5024 - protein, 17 aa, Artificial Sequence
  Synthetically generated peptide
  VARIANT (1)..(17): Xaa = Any Amino Acid
CCXEFCCNXPXACTGXC

SEQ ID NO: 5025 - protein, 16 aa, Artificial Sequence
  Synthetically generated peptide
  VARIANT (1)..(16): Xaa = Any Amino Acid
CCXEFCCNXPAXCTGC

SEQ ID NO: 5026 - protein, 17 aa, Artificial Sequence
  Synthetically generated peptide
  VARIANT (1)..(17): Xaa = Any Amino Acid
CCXEFCCNXPAXXCTGC

SEQ ID NO: 5027 - protein, 17 aa, Artificial Sequence
  Synthetically generated peptide
  VARIANT (1)..(17): Xaa = Any Amino Acid
CCXEFCCNXPAXCXTGC

SEQ ID NO: 5028 - protein, 17 aa, Artificial Sequence
  Synthetically generated peptide
  VARIANT (1)..(17): Xaa = Any Amino Acid
CCXEFCCNXPAXCTXGC

SEQ ID NO: 5029 - protein, 17 aa, Artificial Sequence
  Synthetically generated peptide
  VARIANT (1)..(17): Xaa = Any Amino Acid
CCXEFCCNXPAXCTGXC

SEQ ID NO: 5030 - protein, 16 aa, Artificial Sequence
  Synthetically generated peptide
  VARIANT (1)..(16): Xaa = Any Amino Acid
CCXEFCCNXPACXTGC

SEQ ID NO: 5031 - protein, 17 aa, Artificial Sequence
  Synthetically generated peptide
  VARIANT (1)..(17): Xaa = Any Amino Acid
CCXEFCCNXPACXXTGC

SEQ ID NO: 5032 - protein, 17 aa, Artificial Sequence
  Synthetically generated peptide
  VARIANT (1)..(17): Xaa = Any Amino Acid
CCXEFCCNXPACXTXGC

SEQ ID NO: 5033 - protein, 17 aa, Artificial Sequence
  Synthetically generated peptide
  VARIANT (1)..(17): Xaa = Any Amino Acid
CCXEFCCNXPACXTGXC

SEQ ID NO: 5034 - protein, 16 aa, Artificial Sequence
  Synthetically generated peptide
  VARIANT (1)..(16): Xaa = Any Amino Acid
CCXEFCCNXPACTXGC

SEQ ID NO: 5035 - protein, 17 aa, Artificial Sequence
  Synthetically generated peptide
  VARIANT (1)..(17): Xaa = Any Amino Acid
CCXEFCCNXPACTXXGC

SEQ ID NO: 5036 - protein, 17 aa, Artificial Sequence
  Synthetically generated peptide
  VARIANT (1)..(17): Xaa = Any Amino Acid
CCXEFCCNXPACTXGXC

SEQ ID NO: 5037 - protein, 16 aa, Artificial Sequence
  Synthetically generated peptide
  VARIANT (1)..(16): Xaa = Any Amino Acid
CCXEFCCNXPACTGXC

SEQ ID NO: 5038 - protein, 17 aa, Artificial Sequence
  Synthetically generated peptide
  VARIANT (1)..(17): Xaa = Any Amino Acid
CCXEFCCNXPACTGXXC

SEQ ID NO: 5039 - protein, 15 aa, Artificial Sequence
  Synthetically generated peptide
  VARIANT (1)..(15): Xaa = Any Amino Acid
CCXEFCCNPXACTGC

SEQ ID NO: 5040 - protein, 16 aa, Artificial Sequence
  Synthetically generated peptide
  VARIANT (1)..(16): Xaa = Any Amino Acid
CCXEFCCNPXXACTGC

SEQ ID NO: 5041 - protein, 17 aa, Artificial Sequence
  Synthetically generated peptide
  VARIANT (1)..(17): Xaa = Any Amino Acid
CCXEFCCNPXXXACTGC

SEQ ID NO: 5042 - protein, 17 aa, Artificial Sequence
  Synthetically generated peptide
  VARIANT (1)..(17): Xaa = Any Amino Acid
CCXEFCCNPXXAXCTGC

SEQ ID NO: 5043 - protein, 17 aa, Artificial Sequence
  Synthetically generated peptide
  VARIANT (1)..(17): Xaa = Any Amino Acid
CCXEFCCNPXXACXTGC

SEQ ID NO: 5044 - protein, 17 aa, Artificial Sequence
  Synthetically generated peptide
  VARIANT (1)..(17): Xaa = Any Amino Acid
CCXEFCCNPXXACTXGC

SEQ ID NO: 5045 - protein, 17 aa, Artificial Sequence
  Synthetically generated peptide
  VARIANT (1)..(17): Xaa = Any Amino Acid
CCXEFCCNPXXACTGXC

SEQ ID NO: 5046 - protein, 16 aa, Artificial Sequence
  Synthetically generated peptide
  VARIANT (1)..(16): Xaa = Any Amino Acid
CCXEFCCNPXAXCTGC

SEQ ID NO: 5047 - protein, 17 aa, Artificial Sequence
  Synthetically generated peptide
  VARIANT (1)..(17): Xaa = Any Amino Acid
CCXEFCCNPXAXXCTGC

SEQ ID NO: 5048 - protein, 17 aa, Artificial Sequence
  Synthetically generated peptide
  VARIANT (1)..(17): Xaa = Any Amino Acid
CCXEFCCNPXAXCXTGC

SEQ ID NO: 5049 - protein, 17 aa, Artificial Sequence
  Synthetically generated peptide
  VARIANT (1)..(17): Xaa = Any Amino Acid
CCXEFCCNPXAXCTXGC

SEQ ID NO: 5050 - protein, 17 aa, Artificial Sequence
  Synthetically generated peptide
  VARIANT (1)..(17): Xaa = Any Amino Acid
CCXEFCCNPXAXCTGXC

SEQ ID NO: 5051 - protein, 16 aa, Artificial Sequence
  Synthetically generated peptide
  VARIANT (1)..(16): Xaa = Any Amino Acid
CCXEFCCNPXACXTGC

SEQ ID NO: 5052 - protein, 17 aa, Artificial Sequence
  Synthetically generated peptide
  VARIANT (1)..(17): Xaa = Any Amino Acid
CCXEFCCNPXACXXTGC

SEQ ID NO: 5053 - protein, 17 aa, Artificial Sequence
  Synthetically generated peptide
  VARIANT (1)..(17): Xaa = Any Amino Acid
CCXEFCCNPXACXTXGC

SEQ ID NO: 5054 - protein, 17 aa, Artificial Sequence
  Synthetically generated peptide
  VARIANT (1)..(17): Xaa = Any Amino Acid
CCXEFCCNPXACXTGXC

SEQ ID NO: 5055 - protein, 16 aa, Artificial Sequence
  Synthetically generated peptide
  VARIANT (1)..(16): Xaa = Any Amino Acid
CCXEFCCNPXACTXGC

SEQ ID NO: 5056 - protein, 17 aa, Artificial Sequence
  Synthetically generated peptide
  VARIANT (1)..(17): Xaa = Any Amino Acid
CCXEFCCNPXACTXXGC

SEQ ID NO: 5057 - protein, 17 aa, Artificial Sequence
  Synthetically generated peptide
  VARIANT (1)..(17): Xaa = Any Amino Acid
CCXEFCCNPXACTXGXC

SEQ ID NO: 5058 - protein, 16 aa, Artificial Sequence
  Synthetically generated peptide
  VARIANT (1)..(16): Xaa = Any Amino Acid
CCXEFCCNPXACTGXC

SEQ ID NO: 5059 - protein, 17 aa, Artificial Sequence
  Synthetically generated peptide
  VARIANT (1)..(17): Xaa = Any Amino Acid
CCXEFCCNPXACTGXXC

SEQ ID NO: 5060 - protein, 15 aa, Artificial Sequence
  Synthetically generated peptide
  VARIANT (1)..(15): Xaa = Any Amino Acid
CCXEFCCNPAXCTGC

SEQ ID NO: 5061 - protein, 16 aa, Artificial Sequence
  Synthetically generated peptide
  VARIANT (1)..(16): Xaa = Any Amino Acid
CCXEFCCNPAXXCTGC

SEQ ID NO: 5062 - protein, 17 aa, Artificial Sequence
  Synthetically generated peptide
  VARIANT (1)..(17): Xaa = Any Amino Acid
CCXEFCCNPAXXXCTGC

SEQ ID NO: 5063 - protein, 17 aa, Artificial Sequence
  Synthetically generated peptide
  VARIANT (1)..(17): Xaa = Any Amino Acid
CCXEFCCNPAXXCXTGC

SEQ ID NO: 5064 - protein, 17 aa, Artificial Sequence
  Synthetically generated peptide
  VARIANT (1)..(17): Xaa = Any Amino Acid
CCXEFCCNPAXXCTXGC

SEQ ID NO: 5065 - protein, 17 aa, Artificial Sequence
  Synthetically generated peptide
  VARIANT (1)..(17): Xaa = Any Amino Acid
CCXEFCCNPAXXCTGXC

SEQ ID NO: 5066 - protein, 16 aa, Artificial Sequence
  Synthetically generated peptide
  VARIANT (1)..(16): Xaa = Any Amino Acid
CCXEFCCNPAXCXTGC

SEQ ID NO: 5067 - protein, 17 aa, Artificial Sequence
  Synthetically generated peptide
  VARIANT (1)..(17): Xaa = Any Amino Acid
CCXEFCCNPAXCXXTGC

SEQ ID NO: 5068 - protein, 17 aa, Artificial Sequence
  Synthetically generated peptide
  VARIANT (1)..(17): Xaa = Any Amino Acid
CCXEFCCNPAXCXTXGC

SEQ ID NO: 5069 - protein, 17 aa, Artificial Sequence
  Synthetically generated peptide
  VARIANT (1)..(17): Xaa = Any Amino Acid
CCXEFCCNPAXCXTGXC

SEQ ID NO: 5070 - protein, 16 aa, Artificial Sequence
  Synthetically generated peptide
  VARIANT (1)..(16): Xaa = Any Amino Acid
CCXEFCCNPAXCTXGC

SEQ ID NO: 5071 - protein, 17 aa, Artificial Sequence
  Synthetically generated peptide
  VARIANT (1)..(17): Xaa = Any Amino Acid
CCXEFCCNPAXCTXXGC

SEQ ID NO: 5072 - protein, 17 aa, Artificial Sequence
  Synthetically generated peptide
  VARIANT (1)..(17): Xaa = Any Amino Acid
CCXEFCCNPAXCTXGXC

SEQ ID NO: 5073 - protein, 16 aa, Artificial Sequence
  Synthetically generated peptide
  VARIANT (1)..(16): Xaa = Any Amino Acid
CCXEFCCNPAXCTGXC

SEQ ID NO: 5074 - protein, 17 aa, Artificial Sequence
  Synthetically generated peptide
  VARIANT (1)..(17): Xaa = Any Amino Acid
CCXEFCCNPAXCTGXXC

SEQ ID NO: 5075 - protein, 15 aa, Artificial Sequence
  Synthetically generated peptide
  VARIANT (1)..(15): Xaa = Any Amino Acid
CCXEFCCNPACXTGC

SEQ ID NO: 5076 - protein, 16 aa, Artificial Sequence
  Synthetically generated peptide
  VARIANT (1)..(16): Xaa = Any Amino Acid
CCXEFCCNPACXXTGC

SEQ ID NO: 5077 - protein, 17 aa, Artificial Sequence
  Synthetically generated peptide
  VARIANT (1)..(17): Xaa = Any Amino Acid
CCXEFCCNPACXXXTGC

SEQ ID NO: 5078 - protein, 17 aa, Artificial Sequence
  Synthetically generated peptide
  VARIANT (1)..(17): Xaa = Any Amino Acid
CCXEFCCNPACXXTXGC

SEQ ID NO: 5079 - protein, 17 aa, Artificial Sequence
  Synthetically generated peptide
  VARIANT (1)..(17): Xaa = Any Amino Acid
CCXEFCCNPACXXTGXC

SEQ ID NO: 5080 - protein, 16 aa, Artificial Sequence
  Synthetically generated peptide
  VARIANT (1)..(16): Xaa = Any Amino Acid
CCXEFCCNPACXTXGC

SEQ ID NO: 5081 - protein, 17 aa, Artificial Sequence
  Synthetically generated peptide
  VARIANT (1)..(17): Xaa = Any Amino Acid
CCXEFCCNPACXTXXGC

SEQ ID NO: 5082 - protein, 17 aa, Artificial Sequence
  Synthetically generated peptide
  VARIANT (1)..(17): Xaa = Any Amino Acid
CCXEFCCNPACXTXGXC

SEQ ID NO: 5083 - protein, 16 aa, Artificial Sequence
  Synthetically generated peptide
  VARIANT (1)..(16): Xaa = Any Amino Acid
CCXEFCCNPACXTGXC

SEQ ID NO: 5084 - protein, 17 aa, Artificial Sequence
  Synthetically generated peptide
  VARIANT (1)..(17): Xaa = Any Amino Acid
CCXEFCCNPACXTGXXC

SEQ ID NO: 5085 - protein, 15 aa, Artificial Sequence
  Synthetically generated peptide
  VARIANT (1)..(15): Xaa = Any Amino Acid
CCXEFCCNPACTXGC

SEQ ID NO: 5086 - protein, 16 aa, Artificial Sequence
  Synthetically generated peptide
  VARIANT (1)..(16): Xaa = Any Amino Acid
CCXEFCCNPACTXXGC

SEQ ID NO: 5087 - protein, 17 aa, Artificial Sequence
  Synthetically generated peptide
  VARIANT (1)..(17): Xaa = Any Amino Acid
CCXEFCCNPACTXXXGC

SEQ ID NO: 5088 - protein, 17 aa, Artificial Sequence
  Synthetically generated peptide
  VARIANT (1)..(17): Xaa = Any Amino Acid
CCXEFCCNPACTXXGXC

SEQ ID NO: 5089 - protein, 16 aa, Artificial Sequence
  Synthetically generated peptide
  VARIANT (1)..(16): Xaa = Any Amino Acid
CCXEFCCNPACTXGXC

SEQ ID NO: 5090 - protein, 17 aa, Artificial Sequence
  Synthetically generated peptide
  VARIANT (1)..(17): Xaa = Any Amino Acid
CCXEFCCNPACTXGXXC

SEQ ID NO: 5091 - protein, 15 aa, Artificial Sequence
  Synthetically generated peptide
  VARIANT (1)..(15): Xaa = Any Amino Acid
CCXEFCCNPACTGXC

SEQ ID NO: 5092 - protein, 16 aa, Artificial Sequence
  Synthetically generated peptide
  VARIANT (1)..(16): Xaa = Any Amino Acid
CCXEFCCNPACTGXXC

SEQ ID NO: 5093 - protein, 17 aa, Artificial Sequence
  Synthetically generated peptide
  VARIANT (1)..(17): Xaa = Any Amino Acid
CCXEFCCNPACTGXXXC

SEQ ID NO: 5094 - protein, 14 aa, Artificial Sequence
  Synthetically generated peptide
  VARIANT (1)..(14): Xaa = Any Amino Acid
CCEXFCCNPACTGC

SEQ ID NO: 5095 - protein, 15 aa, Artificial Sequence
  Synthetically generated peptide
  VARIANT (1)..(15): Xaa = Any Amino Acid
CCEXXFCCNPACTGC

SEQ ID NO: 5096 - protein, 16 aa, Artificial Sequence
  Synthetically generated peptide
  VARIANT (1)..(16): Xaa = Any Amino Acid
CCEXXXFCCNPACTGC

SEQ ID NO: 5097 - protein, 17 aa, Artificial Sequence
  Synthetically generated peptide
  VARIANT (1)..(17): Xaa = Any Amino Acid
CCEXXXXFCCNPACTGC

SEQ ID NO: 5098 - protein, 17 aa, Artificial Sequence
  Synthetically generated peptide
  VARIANT (1)..(17): Xaa = Any Amino Acid
CCEXXXFXCCNPACTGC

SEQ ID NO: 5099 - protein, 17 aa, Artificial Sequence
  Synthetically generated peptide
  VARIANT (1)..(17): Xaa = Any Amino Acid
CCEXXXFCCXNPACTGC

SEQ ID NO: 5100 - protein, 17 aa, Artificial Sequence
  Synthetically generated peptide
  VARIANT (1)..(17): Xaa = Any Amino Acid
CCEXXXFCCNXPACTGC

SEQ ID NO: 5101 - protein, 17 aa, Artificial Sequence
  Synthetically generated peptide
  VARIANT (1)..(17): Xaa = Any Amino Acid
CCEXXXFCCNPXACTGC

SEQ ID NO: 5102 - protein, 17 aa, Artificial Sequence
  Synthetically generated peptide
  VARIANT (1)..(17): Xaa = Any Amino Acid
CCEXXXFCCNPAXCTGC

SEQ ID NO: 5103 - protein, 17 aa, Artificial Sequence
  Synthetically generated peptide
  VARIANT (1)..(17): Xaa = Any Amino Acid
CCEXXXFCCNPACXTGC

SEQ ID NO: 5104 - protein, 17 aa, Artificial Sequence
  Synthetically generated peptide
  VARIANT (1)..(17): Xaa = Any Amino Acid
CCEXXXFCCNPACTXGC

SEQ ID NO: 5105 - protein, 17 aa, Artificial Sequence
  Synthetically generated peptide
  VARIANT (1)..(17): Xaa = Any Amino Acid
CCEXXXFCCNPACTGXC

SEQ ID NO: 5106 - protein, 16 aa, Artificial Sequence
  Synthetically generated peptide
  VARIANT (1)..(16): Xaa = Any Amino Acid
CCEXXFXCCNPACTGC

SEQ ID NO: 5107 - protein, 17 aa, Artificial Sequence
  Synthetically generated peptide
  VARIANT (1)..(17): Xaa = Any Amino Acid
CCEXXFXXCCNPACTGC

SEQ ID NO: 5108 - protein, 17 aa, Artificial Sequence
  Synthetically generated peptide
  VARIANT (1)..(17): Xaa = Any Amino Acid
CCEXXFXCCXNPACTGC

SEQ ID NO: 5109 - protein, 17 aa, Artificial Sequence
  Synthetically generated peptide
  VARIANT (1)..(17): Xaa = Any Amino Acid
CCEXXFXCCNXPACTGC

SEQ ID NO: 5110 - protein, 17 aa, Artificial Sequence
  Synthetically generated peptide
  VARIANT (1)..(17): Xaa = Any Amino Acid
CCEXXFXCCNPXACTGC

SEQ ID NO: 5111 - protein, 17 aa, Artificial Sequence
  Synthetically generated peptide
  VARIANT (1)..(17): Xaa = Any Amino Acid
CCEXXFXCCNPAXCTGC

SEQ ID NO: 5112 - protein, 17 aa, Artificial Sequence
  Synthetically generated peptide
  VARIANT (1)..(17): Xaa = Any Amino Acid
CCEXXFXCCNPACXTGC

SEQ ID NO: 5113 - protein, 17 aa, Artificial Sequence
  Synthetically generated peptide
  VARIANT (1)..(17): Xaa = Any Amino Acid
CCEXXFXCCNPACTXGC

SEQ ID NO: 5114 - protein, 17 aa, Artificial Sequence
  Synthetically generated peptide
  VARIANT (1)..(17): Xaa = Any Amino Acid
CCEXXFXCCNPACTGXC

SEQ ID NO: 5115 - protein, 16 aa, Artificial Sequence
  Synthetically generated peptide
  VARIANT (1)..(16): Xaa = Any Amino Acid
CCEXXFCCXNPACTGC

SEQ ID NO: 5116 - protein, 17 aa, Artificial Sequence
  Synthetically generated peptide
  VARIANT (1)..(17): Xaa = Any Amino Acid
CCEXXFCCXXNPACTGC

SEQ ID NO: 5117 - protein, 17 aa, Artificial Sequence
  Synthetically generated peptide
  VARIANT (1)..(17): Xaa = Any Amino Acid
CCEXXFCCXNXPACTGC

SEQ ID NO: 5118 - protein, 17 aa, Artificial Sequence
  Synthetically generated peptide
  VARIANT (1)..(17): Xaa = Any Amino Acid
CCEXXFCCXNPXACTGC

SEQ ID NO: 5119 - protein, 17 aa, Artificial Sequence
  Synthetically generated peptide
  VARIANT (1)..(17): Xaa = Any Amino Acid
CCEXXFCCXNPAXCTGC

SEQ ID NO: 5120 - protein, 17 aa, Artificial Sequence
  Synthetically generated peptide
  VARIANT (1)..(17): Xaa = Any Amino Acid
CCEXXFCCXNPACXTGC

SEQ ID NO: 5121 - protein, 17 aa, Artificial Sequence
  Synthetically generated peptide
  VARIANT (1)..(17): Xaa = Any Amino Acid
CCEXXFCCXNPACTXGC

SEQ ID NO: 5122 - protein, 17 aa, Artificial Sequence
  Synthetically generated peptide
  VARIANT (1)..(17): Xaa = Any Amino Acid
CCEXXFCCXNPACTGXC

SEQ ID NO: 5123 - protein, 16 aa, Artificial Sequence
  Synthetically generated peptide
  VARIANT (1)..(16): Xaa = Any Amino Acid
CCEXXFCCNXPACTGC

SEQ ID NO: 5124 - protein, 17 aa, Artificial Sequence
  Synthetically generated peptide
  VARIANT (1)..(17): Xaa = Any Amino Acid
CCEXXFCCNXXPACTGC

SEQ ID NO: 5125 - protein, 17 aa, Artificial Sequence
  Synthetically generated peptide
  VARIANT (1)..(17): Xaa = Any Amino Acid
CCEXXFCCNXPXACTGC

SEQ ID NO: 5126 - protein, 17 aa, Artificial Sequence
  Synthetically generated peptide
  VARIANT (1)..(17): Xaa = Any Amino Acid
CCEXXFCCNXPAXCTGC

SEQ ID NO: 5127 - protein, 17 aa, Artificial Sequence
  Synthetically generated peptide
  VARIANT (1)..(17): Xaa = Any Amino Acid
CCEXXFCCNXPACXTGC

SEQ ID NO: 5128 - protein, 17 aa, Artificial Sequence
  Synthetically generated peptide
  VARIANT (1)..(17): Xaa = Any Amino Acid
CCEXXFCCNXPACTXGC

SEQ ID NO: 5129 - protein, 17 aa, Artificial Sequence
  Synthetically generated peptide
  VARIANT (1)..(17): Xaa = Any Amino Acid
CCEXXFCCNXPACTGXC

SEQ ID NO: 5130 - protein, 16 aa, Artificial Sequence
  Synthetically generated peptide
  VARIANT (1)..(16): Xaa = Any Amino Acid
CCEXXFCCNPXACTGC

SEQ ID NO: 5131 - protein, 17 aa, Artificial Sequence
  Synthetically generated peptide
  VARIANT (1)..(17): Xaa = Any Amino Acid
CCEXXFCCNPXXACTGC

SEQ ID NO: 5132 - protein, 17 aa, Artificial Sequence
  Synthetically generated peptide
  VARIANT (1)..(17): Xaa = Any Amino Acid
CCEXXFCCNPXAXCTGC

SEQ ID NO: 5133 - protein, 17 aa, Artificial Sequence
  Synthetically generated peptide
  VARIANT (1)..(17): Xaa = Any Amino Acid
CCEXXFCCNPXACXTGC

SEQ ID NO: 5134 - protein, 17 aa, Artificial Sequence
  Synthetically generated peptide
  VARIANT (1)..(17): Xaa = Any Amino Acid
CCEXXFCCNPXACTXGC

SEQ ID NO: 5135 - protein, 17 aa, Artificial Sequence
  Synthetically generated peptide
  VARIANT (1)..(17): Xaa = Any Amino Acid
CCEXXFCCNPXACTGXC

SEQ ID NO: 5136 - protein, 16 aa, Artificial Sequence
  Synthetically generated peptide
  VARIANT (1)..(16): Xaa = Any Amino Acid
CCEXXFCCNPAXCTGC

SEQ ID NO: 5137 - protein, 17 aa, Artificial Sequence
  Synthetically generated peptide
  VARIANT (1)..(17): Xaa = Any Amino Acid
CCEXXFCCNPAXXCTGC

SEQ ID NO: 5138 - protein, 17 aa, Artificial Sequence
  Synthetically generated peptide
  VARIANT (1)..(17): Xaa = Any Amino Acid
CCEXXFCCNPAXCXTGC

SEQ ID NO: 5139 - protein, 17 aa, Artificial Sequence
  Synthetically generated peptide
  VARIANT (1)..(17): Xaa = Any Amino Acid
CCEXXFCCNPAXCTXGC

SEQ ID NO: 5140 - protein, 17 aa, Artificial Sequence
  Synthetically generated peptide
  VARIANT (1)..(17): Xaa = Any Amino Acid
CCEXXFCCNPAXCTGXC

SEQ ID NO: 5141 - protein, 16 aa, Artificial Sequence
  Synthetically generated peptide
  VARIANT (1)..(16): Xaa = Any Amino Acid
CCEXXFCCNPACXTGC

SEQ ID NO: 5142 - protein, 17 aa, Artificial Sequence
  Synthetically generated peptide
  VARIANT (1)..(17): Xaa = Any Amino Acid
CCEXXFCCNPACXXTGC

SEQ ID NO: 5143 - protein, 17 aa, Artificial Sequence
  Synthetically generated peptide
  VARIANT (1)..(17): Xaa = Any Amino Acid
CCEXXFCCNPACXTXGC

SEQ ID NO: 5144 - protein, 17 aa, Artificial Sequence
  Synthetically generated peptide
  VARIANT (1)..(17): Xaa = Any Amino Acid
CCEXXFCCNPACXTGXC

SEQ ID NO: 5145 - protein, 16 aa, Artificial Sequence
  Synthetically generated peptide
  VARIANT (1)..(16): Xaa = Any Amino Acid
CCEXXFCCNPACTXGC

SEQ ID NO: 5146 - protein, 17 aa, Artificial Sequence
  Synthetically generated peptide
  VARIANT (1)..(17): Xaa = Any Amino Acid
CCEXXFCCNPACTXXGC

SEQ ID NO: 5147 - protein, 17 aa, Artificial Sequence
  Synthetically generated peptide
  VARIANT (1)..(17): Xaa = Any Amino Acid
CCEXXFCCNPACTXGXC

SEQ ID NO: 5148 - protein, 16 aa, Artificial Sequence
  Synthetically generated peptide
  VARIANT (1)..(16): Xaa = Any Amino Acid
CCEXXFCCNPACTGXC

SEQ ID NO: 5149 - protein, 17 aa, Artificial Sequence
  Synthetically generated peptide
  VARIANT (1)..(17): Xaa = Any Amino Acid
CCEXXFCCNPACTGXXC

SEQ ID NO: 5150 - protein, 15 aa, Artificial Sequence
  Synthetically generated peptide
  VARIANT (1)..(15): Xaa = Any Amino Acid
CCEXFXCCNPACTGC

SEQ ID NO: 5151 - protein, 16 aa, Artificial Sequence
  Synthetically generated peptide
  VARIANT (1)..(16): Xaa = Any Amino Acid
CCEXFXXCCNPACTGC

SEQ ID NO: 5152 - protein, 17 aa, Artificial Sequence
  Synthetically generated peptide
  VARIANT (1)..(17): Xaa = Any Amino Acid
CCEXFXXXCCNPACTGC

SEQ ID NO: 5153 - protein, 17 aa, Artificial Sequence
  Synthetically generated peptide
  VARIANT (1)..(17): Xaa = Any Amino Acid
CCEXFXXCCXNPACTGC

SEQ ID NO: 5154 - protein, 17 aa, Artificial Sequence
  Synthetically generated peptide
  VARIANT (1)..(17): Xaa = Any Amino Acid
CCEXFXXCCNXPACTGC

SEQ ID NO: 5155 - protein, 17 aa, Artificial Sequence
  Synthetically generated peptide
  VARIANT (1)..(17): Xaa = Any Amino Acid
CCEXFXXCCNPXACTGC

SEQ ID NO: 5156 - protein, 17 aa, Artificial Sequence
  Synthetically generated peptide
  VARIANT (1)..(17): Xaa = Any Amino Acid
CCEXFXXCCNPAXCTGC

SEQ ID NO: 5157 - protein, 17 aa, Artificial Sequence
  Synthetically generated peptide
  VARIANT (1)..(17): Xaa = Any Amino Acid
CCEXFXXCCNPACXTGC

SEQ ID NO: 5158 - protein, 17 aa, Artificial Sequence
  Synthetically generated peptide
  VARIANT (1)..(17): Xaa = Any Amino Acid
CCEXFXXCCNPACTXGC

SEQ ID NO: 5159 - protein, 17 aa, Artificial Sequence
  Synthetically generated peptide
  VARIANT (1)..(17): Xaa = Any Amino Acid
CCEXFXXCCNPACTGXC

SEQ ID NO: 5160 - protein, 16 aa, Artificial Sequence
  Synthetically generated peptide
  VARIANT (1)..(16): Xaa = Any Amino Acid
CCEXFXCCXNPACTGC

SEQ ID NO: 5161 - protein, 17 aa, Artificial Sequence
  Synthetically generated peptide
  VARIANT (1)..(17): Xaa = Any Amino Acid
CCEXFXCCXXNPACTGC

SEQ ID NO: 5162 - protein, 17 aa, Artificial Sequence
  Synthetically generated peptide
  VARIANT (1)..(17): Xaa = Any Amino Acid
CCEXFXCCXNXPACTGC

SEQ ID NO: 5163 - protein, 17 aa, Artificial Sequence
  Synthetically generated peptide
  VARIANT (1)..(17): Xaa = Any Amino Acid
CCEXFXCCXNPXACTGC

SEQ ID NO: 5164 - protein, 17 aa, Artificial Sequence
  Synthetically generated peptide
  VARIANT (1)..(17): Xaa = Any Amino Acid
CCEXFXCCXNPAXCTGC

SEQ ID NO: 5165 - protein, 17 aa, Artificial Sequence
  Synthetically generated peptide
  VARIANT (1)..(17): Xaa = Any Amino Acid
CCEXFXCCXNPACXTGC

SEQ ID NO: 5166 - protein, 17 aa, Artificial Sequence
  Synthetically generated peptide
  VARIANT (1)..(17): Xaa = Any Amino Acid
CCEXFXCCXNPACTXGC

SEQ ID NO: 5167 - protein, 17 aa, Artificial Sequence
  Synthetically generated peptide
  VARIANT (1)..(17): Xaa = Any Amino Acid
CCEXFXCCXNPACTGXC

SEQ ID NO: 5168 - protein, 16 aa, Artificial Sequence
  Synthetically generated peptide
  VARIANT (1)..(16): Xaa = Any Amino Acid
CCEXFXCCNXPACTGC

SEQ ID NO: 5169 - protein, 17 aa, Artificial Sequence
  Synthetically generated peptide
  VARIANT (1)..(17): Xaa = Any Amino Acid
CCEXFXCCNXXPACTGC

SEQ ID NO: 5170 - protein, 17 aa, Artificial Sequence
  Synthetically generated peptide
  VARIANT (1)..(17): Xaa = Any Amino Acid
CCEXFXCCNXPXACTGC

SEQ ID NO: 5171 - protein, 17 aa, Artificial Sequence
  Synthetically generated peptide
  VARIANT (1)..(17): Xaa = Any Amino Acid
CCEXFXCCNXPAXCTGC

SEQ ID NO: 5172 - protein, 17 aa, Artificial Sequence
  Synthetically generated peptide
  VARIANT (1)..(17): Xaa = Any Amino Acid
CCEXFXCCNXPACXTGC

SEQ ID NO: 5173 - protein, 17 aa, Artificial Sequence
  Synthetically generated peptide
  VARIANT (1)..(17): Xaa = Any Amino Acid
CCEXFXCCNXPACTXGC

SEQ ID NO: 5174 - protein, 17 aa, Artificial Sequence
  Synthetically generated peptide
  VARIANT (1)..(17): Xaa = Any Amino Acid
CCEXFXCCNXPACTGXC

SEQ ID NO: 5175 - protein, 16 aa, Artificial Sequence
  Synthetically generated peptide
  VARIANT (1)..(16): Xaa = Any Amino Acid
CCEXFXCCNPXACTGC

SEQ ID NO: 5176 - protein, 17 aa, Artificial Sequence
  Synthetically generated peptide
  VARIANT (1)..(17): Xaa = Any Amino Acid
CCEXFXCCNPXXACTGC

SEQ ID NO: 5177 - protein, 17 aa, Artificial Sequence
  Synthetically generated peptide
  VARIANT (1)..(17): Xaa = Any Amino Acid
CCEXFXCCNPXAXCTGC

SEQ ID NO: 5178 - protein, 17 aa, Artificial Sequence
  Synthetically generated peptide
  VARIANT (1)..(17): Xaa = Any Amino Acid
CCEXFXCCNPXACXTGC

SEQ ID NO: 5179 - protein, 17 aa, Artificial Sequence
  Synthetically generated peptide
  VARIANT (1)..(17): Xaa = Any Amino Acid
CCEXFXCCNPXACTXGC

SEQ ID NO: 5180 - protein, 17 aa, Artificial Sequence
  Synthetically generated peptide
  VARIANT (1)..(17): Xaa = Any Amino Acid
CCEXFXCCNPXACTGXC

SEQ ID NO: 5181 - protein, 16 aa, Artificial Sequence
  Synthetically generated peptide
  VARIANT (1)..(16): Xaa = Any Amino Acid
CCEXFXCCNPAXCTGC

SEQ ID NO: 5182 - protein, 17 aa, Artificial Sequence
  Synthetically generated peptide
  VARIANT (1)..(17): Xaa = Any Amino Acid
CCEXFXCCNPAXXCTGC

SEQ ID NO: 5183 - protein, 17 aa, Artificial Sequence
  Synthetically generated peptide
  VARIANT (1)..(17): Xaa = Any Amino Acid
CCEXFXCCNPAXCXTGC

SEQ ID NO: 5184 - protein, 17 aa, Artificial Sequence
  Synthetically generated peptide
  VARIANT (1)..(17): Xaa = Any Amino Acid
CCEXFXCCNPAXCTXGC

SEQ ID NO: 5185 - protein, 17 aa, Artificial Sequence
  Synthetically generated peptide
  VARIANT (1)..(17): Xaa = Any Amino Acid
CCEXFXCCNPAXCTGXC

SEQ ID NO: 5186 - protein, 16 aa, Artificial Sequence
  Synthetically generated peptide
  VARIANT (1)..(16): Xaa = Any Amino Acid
CCEXFXCCNPACXTGC

SEQ ID NO: 5187 - protein, 17 aa, Artificial Sequence
  Synthetically generated peptide
  VARIANT (1)..(17): Xaa = Any Amino Acid
CCEXFXCCNPACXXTGC

SEQ ID NO: 5188 - protein, 17 aa, Artificial Sequence
  Synthetically generated peptide
  VARIANT (1)..(17): Xaa = Any Amino Acid
CCEXFXCCNPACXTXGC

SEQ ID NO: 5189 - protein, 17 aa, Artificial Sequence
  Synthetically generated peptide
  VARIANT (1)..(17): Xaa = Any Amino Acid
CCEXFXCCNPACXTGXC

SEQ ID NO: 5190 - protein, 16 aa, Artificial Sequence
  Synthetically generated peptide
  VARIANT (1)..(16): Xaa = Any Amino Acid
CCEXFXCCNPACTXGC

SEQ ID NO: 5191 - protein, 17 aa, Artificial Sequence
  Synthetically generated peptide
  VARIANT (1)..(17): Xaa = Any Amino Acid
CCEXFXCCNPACTXXGC

SEQ ID NO: 5192 - protein, 17 aa, Artificial Sequence
  Synthetically generated peptide
  VARIANT (1)..(17): Xaa = Any Amino Acid
CCEXFXCCNPACTXGXC

SEQ ID NO: 5193 - protein, 16 aa, Artificial Sequence
  Synthetically generated peptide
  VARIANT (1)..(16): Xaa = Any Amino Acid
CCEXFXCCNPACTGXC

SEQ ID NO: 5194 - protein, 17 aa, Artificial Sequence
  Synthetically generated peptide
  VARIANT (1)..(17): Xaa = Any Amino Acid
CCEXFXCCNPACTGXXC

SEQ ID NO: 5195 - protein, 15 aa, Artificial Sequence
  Synthetically generated peptide
  VARIANT (1)..(15): Xaa = Any Amino Acid
CCEXFCCXNPACTGC

SEQ ID NO: 5196 - protein, 16 aa, Artificial Sequence
  Synthetically generated peptide
  VARIANT (1)..(16): Xaa = Any Amino Acid
CCEXFCCXXNPACTGC

SEQ ID NO: 5197 - protein, 17 aa, Artificial Sequence
  Synthetically generated peptide
  VARIANT (1)..(17): Xaa = Any Amino Acid
CCEXFCCXXXNPACTGC

SEQ ID NO: 5198 - protein, 17 aa, Artificial Sequence
  Synthetically generated peptide
  VARIANT (1)..(17): Xaa = Any Amino Acid
CCEXFCCXXNXPACTGC

SEQ ID NO: 5199 - protein, 17 aa, Artificial Sequence
  Synthetically generated peptide
  VARIANT (1)..(17): Xaa = Any Amino Acid
CCEXFCCXXNPXACTGC

SEQ ID NO: 5200 - protein, 17 aa, Artificial Sequence
  Synthetically generated peptide
  VARIANT (1)..(17): Xaa = Any Amino Acid
CCEXFCCXXNPAXCTGC

SEQ ID NO: 5201 - protein, 17 aa, Artificial Sequence
  Synthetically generated peptide
  VARIANT (1)..(17): Xaa = Any Amino Acid
CCEXFCCXXNPACXTGC

SEQ ID NO: 5202 - protein, 17 aa, Artificial Sequence
  Synthetically generated peptide
  VARIANT (1)..(17): Xaa = Any Amino Acid
CCEXFCCXXNPACTXGC

SEQ ID NO: 5203 - protein, 17 aa, Artificial Sequence
  Synthetically generated peptide
  VARIANT (1)..(17): Xaa = Any Amino Acid
CCEXFCCXXNPACTGXC

SEQ ID NO: 5204 - protein, 16 aa, Artificial Sequence
  Synthetically generated peptide
  VARIANT (1)..(16): Xaa = Any Amino Acid
CCEXFCCXNXPACTGC

SEQ ID NO: 5205 - protein, 17 aa, Artificial Sequence
  Synthetically generated peptide
  VARIANT (1)..(17): Xaa = Any Amino Acid
CCEXFCCXNXXPACTGC

SEQ ID NO: 5206 - protein, 17 aa, Artificial Sequence
  Synthetically generated peptide
  VARIANT (1)..(17): Xaa = Any Amino Acid
CCEXFCCXNXPXACTGC

SEQ ID NO: 5207 - protein, 17 aa, Artificial Sequence
  Synthetically generated peptide
  VARIANT (1)..(17): Xaa = Any Amino Acid
CCEXFCCXNXPAXCTGC

SEQ ID NO: 5208 - protein, 17 aa, Artificial Sequence
  Synthetically generated peptide
  VARIANT (1)..(17): Xaa = Any Amino Acid
CCEXFCCXNXPACXTGC

SEQ ID NO: 5209 - protein, 17 aa, Artificial Sequence
  Synthetically generated peptide
  VARIANT (1)..(17): Xaa = Any Amino Acid
CCEXFCCXNXPACTXGC

SEQ ID NO: 5210 - protein, 17 aa, Artificial Sequence
  Synthetically generated peptide
  VARIANT (1)..(17): Xaa = Any Amino Acid
CCEXFCCXNXPACTGXC

SEQ ID NO: 5211 - protein, 16 aa, Artificial Sequence
  Synthetically generated peptide
  VARIANT (1)..(16): Xaa = Any Amino Acid
CCEXFCCXNPXACTGC

SEQ ID NO: 5212 - protein, 17 aa, Artificial Sequence
  Synthetically generated peptide
  VARIANT (1)..(17): Xaa = Any Amino Acid
CCEXFCCXNPXXACTGC

SEQ ID NO: 5213 - protein, 17 aa, Artificial Sequence
  Synthetically generated peptide
  VARIANT (1)..(17): Xaa = Any Amino Acid
CCEXFCCXNPXAXCTGC

SEQ ID NO: 5214 - protein, 17 aa, Artificial Sequence
  Synthetically generated peptide
  VARIANT (1)..(17): Xaa = Any Amino Acid
CCEXFCCXNPXACXTGC

SEQ ID NO: 5215 - protein, 17 aa, Artificial Sequence
  Synthetically generated peptide
  VARIANT (1)..(17): Xaa = Any Amino Acid
CCEXFCCXNPXACTXGC

SEQ ID NO: 5216 - protein, 17 aa, Artificial Sequence
  Synthetically generated peptide
  VARIANT (1)..(17): Xaa = Any Amino Acid
CCEXFCCXNPXACTGXC

SEQ ID NO: 5217 - protein, 16 aa, Artificial Sequence
  Synthetically generated peptide
  VARIANT (1)..(16): Xaa = Any Amino Acid
CCEXFCCXNPAXCTGC

SEQ ID NO: 5218 - protein, 17 aa, Artificial Sequence
  Synthetically generated peptide
  VARIANT (1)..(17): Xaa = Any Amino Acid
CCEXFCCXNPAXXCTGC

SEQ ID NO: 5219 - protein, 17 aa, Artificial Sequence
  Synthetically generated peptide
  VARIANT (1)..(17): Xaa = Any Amino Acid
CCEXFCCXNPAXCXTGC

SEQ ID NO: 5220 - protein, 17 aa, Artificial Sequence
  Synthetically generated peptide
  VARIANT (1)..(17): Xaa = Any Amino Acid
CCEXFCCXNPAXCTXGC

SEQ ID NO: 5221 - protein, 17 aa, Artificial Sequence
  Synthetically generated peptide
  VARIANT (1)..(17): Xaa = Any Amino Acid
CCEXFCCXNPAXCTGXC

SEQ ID NO: 5222 - protein, 16 aa, Artificial Sequence
  Synthetically generated peptide
  VARIANT (1)..(16): Xaa = Any Amino Acid
CCEXFCCXNPACXTGC

SEQ ID NO: 5223 - protein, 17 aa, Artificial Sequence
  Synthetically generated peptide
  VARIANT (1)..(17): Xaa = Any Amino Acid
CCEXFCCXNPACXXTGC

SEQ ID NO: 5224 - protein, 17 aa, Artificial Sequence
  Synthetically generated peptide
  VARIANT (1)..(17): Xaa = Any Amino Acid
CCEXFCCXNPACXTXGC

SEQ ID NO: 5225 - protein, 17 aa, Artificial Sequence
  Synthetically generated peptide
  VARIANT (1)..(17): Xaa = Any Amino Acid
CCEXFCCXNPACXTGXC

SEQ ID NO: 5226 - protein, 16 aa, Artificial Sequence
  Synthetically generated peptide
  VARIANT (1)..(16): Xaa = Any Amino Acid
CCEXFCCXNPACTXGC

SEQ ID NO: 5227 - protein, 17 aa, Artificial Sequence
  Synthetically generated peptide
  VARIANT (1)..(17): Xaa = Any Amino Acid
CCEXFCCXNPACTXXGC

SEQ ID NO: 5228 - protein, 17 aa, Artificial Sequence
  Synthetically generated peptide
  VARIANT (1)..(17): Xaa = Any Amino Acid
CCEXFCCXNPACTXGXC

SEQ ID NO: 5229 - protein, 16 aa, Artificial Sequence
  Synthetically generated peptide
  VARIANT (1)..(16): Xaa = Any Amino Acid
CCEXFCCXNPACTGXC

SEQ ID NO: 5230 - protein, 17 aa, Artificial Sequence
  Synthetically generated peptide
  VARIANT (1)..(17): Xaa = Any Amino Acid
CCEXFCCXNPACTGXXC

SEQ ID NO: 5231 - protein, 15 aa, Artificial Sequence
  Synthetically generated peptide
  VARIANT (1)..(15): Xaa = Any Amino Acid
CCEXFCCNXPACTGC

SEQ ID NO: 5232 - protein, 16 aa, Artificial Sequence
  Synthetically generated peptide
  VARIANT (1)..(16): Xaa = Any Amino Acid
CCEXFCCNXXPACTGC

SEQ ID NO: 5233 - protein, 17 aa, Artificial Sequence
  Synthetically generated peptide
  VARIANT (1)..(17): Xaa = Any Amino Acid
CCEXFCCNXXXPACTGC

SEQ ID NO: 5234 - protein, 17 aa, Artificial Sequence
  Synthetically generated peptide
  VARIANT (1)..(17): Xaa = Any Amino Acid
CCEXFCCNXXPXACTGC

SEQ ID NO: 5235 - protein, 17 aa, Artificial Sequence
  Synthetically generated peptide
  VARIANT (1)..(17): Xaa = Any Amino Acid
CCEXFCCNXXPAXCTGC

SEQ ID NO: 5236 - protein, 17 aa, Artificial Sequence
  Synthetically generated peptide
  VARIANT (1)..(17): Xaa = Any Amino Acid
CCEXFCCNXXPACXTGC

SEQ ID NO: 5237 - protein, 17 aa, Artificial Sequence
  Synthetically generated peptide
  VARIANT (1)..(17): Xaa = Any Amino Acid
CCEXFCCNXXPACTXGC

SEQ ID NO: 5238 - protein, 17 aa, Artificial Sequence
  Synthetically generated peptide
  VARIANT (1)..(17): Xaa = Any Amino Acid
CCEXFCCNXXPACTGXC

SEQ ID NO: 5239 - protein, 16 aa, Artificial Sequence
  Synthetically generated peptide
  VARIANT (1)..(16): Xaa = Any Amino Acid
CCEXFCCNXPXACTGC

SEQ ID NO: 5240 - protein, 17 aa, Artificial Sequence
  Synthetically generated peptide
  VARIANT (1)..(17): Xaa = Any Amino Acid
CCEXFCCNXPXXACTGC

SEQ ID NO: 5241 - protein, 17 aa, Artificial Sequence
  Synthetically generated peptide
  VARIANT (1)..(17): Xaa = Any Amino Acid
CCEXFCCNXPXAXCTGC

SEQ ID NO: 5242 - protein, 17 aa, Artificial Sequence
  Synthetically generated peptide
  VARIANT (1)..(17): Xaa = Any Amino Acid
CCEXFCCNXPXACXTGC

SEQ ID NO: 5243 - protein, 17 aa, Artificial Sequence
  Synthetically generated peptide
  VARIANT (1)..(17): Xaa = Any Amino Acid
CCEXFCCNXPXACTXGC

SEQ ID NO: 5244 - protein, 17 aa, Artificial Sequence
  Synthetically generated peptide
  VARIANT (1)..(17): Xaa = Any Amino Acid
CCEXFCCNXPXACTGXC

SEQ ID NO: 5245 - protein, 16 aa, Artificial Sequence
  Synthetically generated peptide
  VARIANT (1)..(16): Xaa = Any Amino Acid
CCEXFCCNXPAXCTGC

SEQ ID NO: 5246 - protein, 17 aa, Artificial Sequence
  Synthetically generated peptide
  VARIANT (1)..(17): Xaa = Any Amino Acid
CCEXFCCNXPAXXCTGC

SEQ ID NO: 5247 - protein, 17 aa, Artificial Sequence
  Synthetically generated peptide
  VARIANT (1)..(17): Xaa = Any Amino Acid
CCEXFCCNXPAXCXTGC

SEQ ID NO: 5248 - protein, 17 aa, Artificial Sequence
  Synthetically generated peptide
  VARIANT (1)..(17): Xaa = Any Amino Acid
CCEXFCCNXPAXCTXGC

SEQ ID NO: 5249 - protein, 17 aa, Artificial Sequence
  Synthetically generated peptide
  VARIANT (1)..(17): Xaa = Any Amino Acid
CCEXFCCNXPAXCTGXC

SEQ ID NO: 5250 - protein, 16 aa, Artificial Sequence
  Synthetically generated peptide
  VARIANT (1)..(16): Xaa = Any Amino Acid
CCEXFCCNXPACXTGC

SEQ ID NO: 5251 - protein, 17 aa, Artificial Sequence
  Synthetically generated peptide
  VARIANT (1)..(17): Xaa = Any Amino Acid
CCEXFCCNXPACXXTGC

SEQ ID NO: 5252 - protein, 17 aa, Artificial Sequence
  Synthetically generated peptide
  VARIANT (1)..(17): Xaa = Any Amino Acid
CCEXFCCNXPACXTXGC

SEQ ID NO: 5253 - protein, 17 aa, Artificial Sequence
  Synthetically generated peptide
  VARIANT (1)..(17): Xaa = Any Amino Acid
CCEXFCCNXPACXTGXC

SEQ ID NO: 5254 - protein, 16 aa, Artificial Sequence
  Synthetically generated peptide
  VARIANT (1)..(16): Xaa = Any Amino Acid
CCEXFCCNXPACTXGC

SEQ ID NO: 5255 - protein, 17 aa, Artificial Sequence
  Synthetically generated peptide
  VARIANT (1)..(17): Xaa = Any Amino Acid
CCEXFCCNXPACTXXGC

SEQ ID NO: 5256 - protein, 17 aa, Artificial Sequence
  Synthetically generated peptide
  VARIANT (1)..(17): Xaa = Any Amino Acid
CCEXFCCNXPACTXGXC

SEQ ID NO: 5257 - protein, 16 aa, Artificial Sequence
  Synthetically generated peptide
  VARIANT (1)..(16): Xaa = Any Amino Acid
CCEXFCCNXPACTGXC

SEQ ID NO: 5258 - protein, 17 aa, Artificial Sequence
  Synthetically generated peptide
  VARIANT (1)..(17): Xaa = Any Amino Acid
CCEXFCCNXPACTGXXC

SEQ ID NO: 5259 - protein, 15 aa, Artificial Sequence
  Synthetically generated peptide
  VARIANT (1)..(15): Xaa = Any Amino Acid
CCEXFCCNPXACTGC

SEQ ID NO: 5260 - protein, 16 aa, Artificial Sequence
  Synthetically generated peptide
  VARIANT (1)..(16): Xaa = Any Amino Acid
CCEXFCCNPXXACTGC

SEQ ID NO: 5261 - protein, 17 aa, Artificial Sequence
  Synthetically generated peptide
  VARIANT (1)..(17): Xaa = Any Amino Acid
CCEXFCCNPXXXACTGC

SEQ ID NO: 5262 - protein, 17 aa, Artificial Sequence
  Synthetically generated peptide
  VARIANT (1)..(17): Xaa = Any Amino Acid
CCEXFCCNPXXAXCTGC

SEQ ID NO: 5263 - protein, 17 aa, Artificial Sequence
  Synthetically generated peptide
  VARIANT (1)..(17): Xaa = Any Amino Acid
CCEXFCCNPXXACXTGC

SEQ ID NO: 5264 - protein, 17 aa, Artificial Sequence
  Synthetically generated peptide
  VARIANT (1)..(17): Xaa = Any Amino Acid
CCEXFCCNPXXACTXGC

SEQ ID NO: 5265 - protein, 17 aa, Artificial Sequence
  Synthetically generated peptide
  VARIANT (1)..(17): Xaa = Any Amino Acid
CCEXFCCNPXXACTGXC

SEQ ID NO: 5266 - protein, 16 aa, Artificial Sequence
  Synthetically generated peptide
  VARIANT (1)..(16): Xaa = Any Amino Acid
CCEXFCCNPXAXCTGC

SEQ ID NO: 5267 - protein, 17 aa, Artificial Sequence
  Synthetically generated peptide
  VARIANT (1)..(17): Xaa = Any Amino Acid
CCEXFCCNPXAXXCTGC

SEQ ID NO: 5268 - protein, 17 aa, Artificial Sequence
  Synthetically generated peptide
  VARIANT (1)..(17): Xaa = Any Amino Acid
CCEXFCCNPXAXCXTGC

SEQ ID NO: 5269 - protein, 17 aa, Artificial Sequence
  Synthetically generated peptide
  VARIANT (1)..(17): Xaa = Any Amino Acid
CCEXFCCNPXAXCTXGC

SEQ ID NO: 5270 - protein, 17 aa, Artificial Sequence
  Synthetically generated peptide
  VARIANT (1)..(17): Xaa = Any Amino Acid
CCEXFCCNPXAXCTGXC

SEQ ID NO: 5271 - protein, 16 aa, Artificial Sequence
  Synthetically generated peptide
  VARIANT (1)..(16): Xaa = Any Amino Acid
CCEXFCCNPXACXTGC

SEQ ID NO: 5272 - protein, 17 aa, Artificial Sequence
  Synthetically generated peptide
  VARIANT (1)..(17): Xaa = Any Amino Acid
CCEXFCCNPXACXXTGC

SEQ ID NO: 5273 - protein, 17 aa, Artificial Sequence
  Synthetically generated peptide
  VARIANT (1)..(17): Xaa = Any Amino Acid
CCEXFCCNPXACXTXGC

SEQ ID NO: 5274 - protein, 17 aa, Artificial Sequence
  Synthetically generated peptide
  VARIANT (1)..(17): Xaa = Any Amino Acid
CCEXFCCNPXACXTGXC

SEQ ID NO: 5275 - protein, 16 aa, Artificial Sequence
  Synthetically generated peptide
  VARIANT (1)..(16): Xaa = Any Amino Acid
CCEXFCCNPXACTXGC

SEQ ID NO: 5276 - protein, 17 aa, Artificial Sequence
  Synthetically generated peptide
  VARIANT (1)..(17): Xaa = Any Amino Acid
CCEXFCCNPXACTXXGC

SEQ ID NO: 5277 - protein, 17 aa, Artificial Sequence
  Synthetically generated peptide
  VARIANT (1)..(17): Xaa = Any Amino Acid
CCEXFCCNPXACTXGXC

SEQ ID NO: 5278 - protein, 16 aa, Artificial Sequence
  Synthetically generated peptide
  VARIANT (1)..(16): Xaa = Any Amino Acid
CCEXFCCNPXACTGXC

SEQ ID NO: 5279 - protein, 17 aa, Artificial Sequence
  Synthetically generated peptide
  VARIANT (1)..(17): Xaa = Any Amino Acid
CCEXFCCNPXACTGXXC

SEQ ID NO: 5280 - protein, 15 aa, Artificial Sequence
  Synthetically generated peptide
  VARIANT (1)..(15): Xaa = Any Amino Acid
CCEXFCCNPAXCTGC

SEQ ID NO: 5281 - protein, 16 aa, Artificial Sequence
  Synthetically generated peptide
  VARIANT (1)..(16): Xaa = Any Amino Acid
CCEXFCCNPAXXCTGC

SEQ ID NO: 5282 - protein, 17 aa, Artificial Sequence
  Synthetically generated peptide
  VARIANT (1)..(17): Xaa = Any Amino Acid
CCEXFCCNPAXXXCTGC

SEQ ID NO: 5283 - protein, 17 aa, Artificial Sequence
  Synthetically generated peptide
  VARIANT (1)..(17): Xaa = Any Amino Acid
CCEXFCCNPAXXCXTGC

SEQ ID NO: 5284 - protein, 17 aa, Artificial Sequence
  Synthetically generated peptide
  VARIANT (1)..(17): Xaa = Any Amino Acid
CCEXFCCNPAXXCTXGC

SEQ ID NO: 5285 - protein, 17 aa, Artificial Sequence
  Synthetically generated peptide
  VARIANT (1)..(17): Xaa = Any Amino Acid
CCEXFCCNPAXXCTGXC

SEQ ID NO: 5286 - protein, 16 aa, Artificial Sequence
  Synthetically generated peptide
  VARIANT (1)..(16): Xaa = Any Amino Acid
CCEXFCCNPAXCXTGC

SEQ ID NO: 5287 - protein, 17 aa, Artificial Sequence
  Synthetically generated peptide
  VARIANT (1)..(17): Xaa = Any Amino Acid
CCEXFCCNPAXCXXTGC

SEQ ID NO: 5288 - protein, 17 aa, Artificial Sequence
  Synthetically generated peptide
  VARIANT (1)..(17): Xaa = Any Amino Acid
CCEXFCCNPAXCXTXGC

SEQ ID NO: 5289 - protein, 17 aa, Artificial Sequence
  Synthetically generated peptide
  VARIANT (1)..(17): Xaa = Any Amino Acid
CCEXFCCNPAXCXTGXC

SEQ ID NO: 5290 - protein, 16 aa, Artificial Sequence
  Synthetically generated peptide
  VARIANT (1)..(16): Xaa = Any Amino Acid
CCEXFCCNPAXCTXGC

SEQ ID NO: 5291 - protein, 17 aa, Artificial Sequence
  Synthetically generated peptide
  VARIANT (1)..(17): Xaa = Any Amino Acid
CCEXFCCNPAXCTXXGC

SEQ ID NO: 5292 - protein, 17 aa, Artificial Sequence
  Synthetically generated peptide
  VARIANT (1)..(17): Xaa = Any Amino Acid
CCEXFCCNPAXCTXGXC

SEQ ID NO: 5293 - protein, 16 aa, Artificial Sequence
  Synthetically generated peptide
  VARIANT (1)..(16): Xaa = Any Amino Acid
CCEXFCCNPAXCTGXC

SEQ ID NO: 5294 - protein, 17 aa, Artificial Sequence
  Synthetically generated peptide
  VARIANT (1)..(17): Xaa = Any Amino Acid
CCEXFCCNPAXCTGXXC

SEQ ID NO: 5295 - protein, 15 aa, Artificial Sequence
  Synthetically generated peptide
  VARIANT (1)..(15): Xaa = Any Amino Acid
CCEXFCCNPACXTGC

SEQ ID NO: 5296 - protein, 16 aa, Artificial Sequence
  Synthetically generated peptide
  VARIANT (1)..(16): Xaa = Any Amino Acid
CCEXFCCNPACXXTGC

SEQ ID NO: 5297 - protein, 17 aa, Artificial Sequence
  Synthetically generated peptide
  VARIANT (1)..(17): Xaa = Any Amino Acid
CCEXFCCNPACXXXTGC

SEQ ID NO: 5298 - protein, 17 aa, Artificial Sequence
  Synthetically generated peptide
  VARIANT (1)..(17): Xaa = Any Amino Acid
CCEXFCCNPACXXTXGC

SEQ ID NO: 5299 - protein, 17 aa, Artificial Sequence
  Synthetically generated peptide
  VARIANT (1)..(17): Xaa = Any Amino Acid
CCEXFCCNPACXXTGXC

SEQ ID NO: 5300 - protein, 16 aa, Artificial Sequence
  Synthetically generated peptide
  VARIANT (1)..(16): Xaa = Any Amino Acid
CCEXFCCNPACXTXGC

SEQ ID NO: 5301 - protein, 17 aa, Artificial Sequence
  Synthetically generated peptide
  VARIANT (1)..(17): Xaa = Any Amino Acid
CCEXFCCNPACXTXXGC

SEQ ID NO: 5302 - protein, 17 aa, Artificial Sequence
  Synthetically generated peptide
  VARIANT (1)..(17): Xaa = Any Amino Acid
CCEXFCCNPACXTXGXC

SEQ ID NO: 5303 - protein, 16 aa, Artificial Sequence
  Synthetically generated peptide
  VARIANT (1)..(16): Xaa = Any Amino Acid
CCEXFCCNPACXTGXC

SEQ ID NO: 5304 - protein, 17 aa, Artificial Sequence
  Synthetically generated peptide
  VARIANT (1)..(17): Xaa = Any Amino Acid
CCEXFCCNPACXTGXXC

SEQ ID NO: 5305 - protein, 15 aa, Artificial Sequence
  Synthetically generated peptide
  VARIANT (1)..(15): Xaa = Any Amino Acid
CCEXFCCNPACTXGC

SEQ ID NO: 5306 - protein, 16 aa, Artificial Sequence
  Synthetically generated peptide
  VARIANT (1)..(16): Xaa = Any Amino Acid
CCEXFCCNPACTXXGC

SEQ ID NO: 5307 - protein, 17 aa, Artificial Sequence
  Synthetically generated peptide
  VARIANT (1)..(17): Xaa = Any Amino Acid
CCEXFCCNPACTXXXGC

SEQ ID NO: 5308 - protein, 17 aa, Artificial Sequence
  Synthetically generated peptide
  VARIANT (1)..(17): Xaa = Any Amino Acid
CCEXFCCNPACTXXGXC

SEQ ID NO: 5309 - protein, 16 aa, Artificial Sequence
  Synthetically generated peptide
  VARIANT (1)..(16): Xaa = Any Amino Acid
CCEXFCCNPACTXGXC

SEQ ID NO: 5310 - protein, 17 aa, Artificial Sequence
  Synthetically generated peptide
  VARIANT (1)..(17): Xaa = Any Amino Acid
CCEXFCCNPACTXGXXC

SEQ ID NO: 5311 - protein, 15 aa, Artificial Sequence
  Synthetically generated peptide
  VARIANT (1)..(15): Xaa = Any Amino Acid
CCEXFCCNPACTGXC

SEQ ID NO: 5312 - protein, 16 aa, Artificial Sequence
  Synthetically generated peptide
  VARIANT (1)..(16): Xaa = Any Amino Acid
CCEXFCCNPACTGXXC

SEQ ID NO: 5313 - protein, 17 aa, Artificial Sequence
  Synthetically generated peptide
  VARIANT (1)..(17): Xaa = Any Amino Acid
CCEXFCCNPACTGXXXC

SEQ ID NO: 5314 - protein, 14 aa, Artificial Sequence
  Synthetically generated peptide
  VARIANT (1)..(14): Xaa = Any Amino Acid
CCEFXCCNPACTGC

SEQ ID NO: 5315 - protein, 15 aa, Artificial Sequence
  Synthetically generated peptide
  VARIANT (1)..(15): Xaa = Any Amino Acid
CCEFXXCCNPACTGC

SEQ ID NO: 5316 - protein, 16 aa, Artificial Sequence
  Synthetically generated peptide
  VARIANT (1)..(16): Xaa = Any Amino Acid
CCEFXXXCCNPACTGC

SEQ ID NO: 5317 - protein, 17 aa, Artificial Sequence
  Synthetically generated peptide
  VARIANT (1)..(17): Xaa = Any Amino Acid
CCEFXXXXCCNPACTGC

SEQ ID NO: 5318 - protein, 17 aa, Artificial Sequence
  Synthetically generated peptide
  VARIANT (1)..(17): Xaa = Any Amino Acid
CCEFXXXCCXNPACTGC

SEQ ID NO: 5319 - protein, 17 aa, Artificial Sequence
  Synthetically generated peptide
  VARIANT (1)..(17): Xaa = Any Amino Acid
CCEFXXXCCNXPACTGC

SEQ ID NO: 5320 - protein, 17 aa, Artificial Sequence
  Synthetically generated peptide
  VARIANT (1)..(17): Xaa = Any Amino Acid
CCEFXXXCCNPXACTGC

SEQ ID NO: 5321 - protein, 17 aa, Artificial Sequence
  Synthetically generated peptide
  VARIANT (1)..(17): Xaa = Any Amino Acid
CCEFXXXCCNPAXCTGC

SEQ ID NO: 5322 - protein, 17 aa, Artificial Sequence
  Synthetically generated peptide
  VARIANT (1)..(17): Xaa = Any Amino Acid
CCEFXXXCCNPACXTGC

SEQ ID NO: 5323 - protein, 17 aa, Artificial Sequence
  Synthetically generated peptide
  VARIANT (1)..(17): Xaa = Any Amino Acid
CCEFXXXCCNPACTXGC

SEQ ID NO: 5324 - protein, 17 aa, Artificial Sequence
  Synthetically generated peptide
  VARIANT (1)..(17): Xaa = Any Amino Acid
CCEFXXXCCNPACTGXC

SEQ ID NO: 5325 - protein, 16 aa, Artificial Sequence
  Synthetically generated peptide
  VARIANT (1)..(16): Xaa = Any Amino Acid
CCEFXXCCXNPACTGC

SEQ ID NO: 5326 - protein, 17 aa, Artificial Sequence
  Synthetically generated peptide
  VARIANT (1)..(17): Xaa = Any Amino Acid
CCEFXXCCXXNPACTGC

SEQ ID NO: 5327 - protein, 17 aa, Artificial Sequence
  Synthetically generated peptide
  VARIANT (1)..(17): Xaa = Any Amino Acid
CCEFXXCCXNXPACTGC

SEQ ID NO: 5328 - protein, 17 aa, Artificial Sequence
  Synthetically generated peptide
  VARIANT (1)..(17): Xaa = Any Amino Acid
CCEFXXCCXNPXACTGC

SEQ ID NO: 5329 - protein, 17 aa, Artificial Sequence
  Synthetically generated peptide
  VARIANT (1)..(17): Xaa = Any Amino Acid
CCEFXXCCXNPAXCTGC

SEQ ID NO: 5330 - protein, 17 aa, Artificial Sequence
  Synthetically generated peptide
  VARIANT (1)..(17): Xaa = Any Amino Acid
CCEFXXCCXNPACXTGC

SEQ ID NO: 5331 - protein, 17 aa, Artificial Sequence
  Synthetically generated peptide
  VARIANT (1)..(17): Xaa = Any Amino Acid
CCEFXXCCXNPACTXGC

SEQ ID NO: 5332 - protein, 17 aa, Artificial Sequence
  Synthetically generated peptide
  VARIANT (1)..(17): Xaa = Any Amino Acid
CCEFXXCCXNPACTGXC

SEQ ID NO: 5333 - protein, 16 aa, Artificial Sequence
  Synthetically generated peptide
  VARIANT (1)..(16): Xaa = Any Amino Acid
CCEFXXCCNXPACTGC

SEQ ID NO: 5334 - protein, 17 aa, Artificial Sequence
  Synthetically generated peptide
  VARIANT (1)..(17): Xaa = Any Amino Acid
CCEFXXCCNXXPACTGC

SEQ ID NO: 5335 - protein, 17 aa, Artificial Sequence
  Synthetically generated peptide
  VARIANT (1)..(17): Xaa = Any Amino Acid
CCEFXXCCNXPXACTGC

SEQ ID NO: 5336 - protein, 17 aa, Artificial Sequence
  Synthetically generated peptide
  VARIANT (1)..(17): Xaa = Any Amino Acid
CCEFXXCCNXPAXCTGC

SEQ ID NO: 5337 - protein, 17 aa, Artificial Sequence
  Synthetically generated peptide
  VARIANT (1)..(17): Xaa = Any Amino Acid
CCEFXXCCNXPACXTGC

SEQ ID NO: 5338 - protein, 17 aa, Artificial Sequence
  Synthetically generated peptide
  VARIANT (1)..(17): Xaa = Any Amino Acid
CCEFXXCCNXPACTXGC

SEQ ID NO: 5339 - protein, 17 aa, Artificial Sequence
  Synthetically generated peptide
  VARIANT (1)..(17): Xaa = Any Amino Acid
CCEFXXCCNXPACTGXC

SEQ ID NO: 5340 - protein, 16 aa, Artificial Sequence
  Synthetically generated peptide
  VARIANT (1)..(16): Xaa = Any Amino Acid
CCEFXXCCNPXACTGC

SEQ ID NO: 5341 - protein, 17 aa, Artificial Sequence
  Synthetically generated peptide
  VARIANT (1)..(17): Xaa = Any Amino Acid
CCEFXXCCNPXXACTGC

SEQ ID NO: 5342 - protein, 17 aa, Artificial Sequence
  Synthetically generated peptide
  VARIANT (1)..(17): Xaa = Any Amino Acid
CCEFXXCCNPXAXCTGC

SEQ ID NO: 5343 - protein, 17 aa, Artificial Sequence
  Synthetically generated peptide
  VARIANT (1)..(17): Xaa = Any Amino Acid
CCEFXXCCNPXACXTGC

SEQ ID NO: 5344 - protein, 17 aa, Artificial Sequence
  Synthetically generated peptide
  VARIANT (1)..(17): Xaa = Any Amino Acid
CCEFXXCCNPXACTXGC

SEQ ID NO: 5345 - protein, 17 aa, Artificial Sequence
  Synthetically generated peptide
  VARIANT (1)..(17): Xaa = Any Amino Acid
CCEFXXCCNPXACTGXC

SEQ ID NO: 5346 - protein, 16 aa, Artificial Sequence
  Synthetically generated peptide
  VARIANT (1)..(16): Xaa = Any Amino Acid
CCEFXXCCNPAXCTGC

SEQ ID NO: 5347 - protein, 17 aa, Artificial Sequence
  Synthetically generated peptide
  VARIANT (1)..(17): Xaa = Any Amino Acid
CCEFXXCCNPAXXCTGC

SEQ ID NO: 5348 - protein, 17 aa, Artificial Sequence
  Synthetically generated peptide
  VARIANT (1)..(17): Xaa = Any Amino Acid
CCEFXXCCNPAXCXTGC

SEQ ID NO: 5349 - protein, 17 aa, Artificial Sequence
  Synthetically generated peptide
  VARIANT (1)..(17): Xaa = Any Amino Acid
CCEFXXCCNPAXCTXGC

SEQ ID NO: 5350 - protein, 17 aa, Artificial Sequence
  Synthetically generated peptide
  VARIANT (1)..(17): Xaa = Any Amino Acid
CCEFXXCCNPAXCTGXC

SEQ ID NO: 5351 - protein, 16 aa, Artificial Sequence
  Synthetically generated peptide
  VARIANT (1)..(16): Xaa = Any Amino Acid
CCEFXXCCNPACXTGC

SEQ ID NO: 5352 - protein, 17 aa, Artificial Sequence
  Synthetically generated peptide
  VARIANT (1)..(17): Xaa = Any Amino Acid
CCEFXXCCNPACXXTGC

SEQ ID NO: 5353 - protein, 17 aa, Artificial Sequence
  Synthetically generated peptide
  VARIANT (1)..(17): Xaa = Any Amino Acid
CCEFXXCCNPACXTXGC

SEQ ID NO: 5354 - protein, 17 aa, Artificial Sequence
  Synthetically generated peptide
  VARIANT (1)..(17): Xaa = Any Amino Acid
CCEFXXCCNPACXTGXC

SEQ ID NO: 5355 - protein, 16 aa, Artificial Sequence
  Synthetically generated peptide
  VARIANT (1)..(16): Xaa = Any Amino Acid
CCEFXXCCNPACTXGC

SEQ ID NO: 5356 - protein, 17 aa, Artificial Sequence
  Synthetically generated peptide
  VARIANT (1)..(17): Xaa = Any Amino Acid
CCEFXXCCNPACTXXGC

SEQ ID NO: 5357 - protein, 17 aa, Artificial Sequence
  Synthetically generated peptide
  VARIANT (1)..(17): Xaa = Any Amino Acid
CCEFXXCCNPACTXGXC

SEQ ID NO: 5358 - protein, 16 aa, Artificial Sequence
  Synthetically generated peptide
  VARIANT (1)..(16): Xaa = Any Amino Acid
CCEFXXCCNPACTGXC

SEQ ID NO: 5359 - protein, 17 aa, Artificial Sequence
  Synthetically generated peptide
  VARIANT (1)..(17): Xaa = Any Amino Acid
CCEFXXCCNPACTGXXC

SEQ ID NO: 5360 - protein, 15 aa, Artificial Sequence
  Synthetically generated peptide
  VARIANT (1)..(15): Xaa = Any Amino Acid
CCEFXCCXNPACTGC

SEQ ID NO: 5361 - protein, 16 aa, Artificial Sequence
  Synthetically generated peptide
  VARIANT (1)..(16): Xaa = Any Amino Acid
CCEFXCCXXNPACTGC

SEQ ID NO: 5362 - protein, 17 aa, Artificial Sequence
  Synthetically generated peptide
  VARIANT (1)..(17): Xaa = Any Amino Acid
CCEFXCCXXXNPACTGC

SEQ ID NO: 5363 - protein, 17 aa, Artificial Sequence
  Synthetically generated peptide
  VARIANT (1)..(17): Xaa = Any Amino Acid
CCEFXCCXXNXPACTGC

SEQ ID NO: 5364 - protein, 17 aa, Artificial Sequence
  Synthetically generated peptide
  VARIANT (1)..(17): Xaa = Any Amino Acid
CCEFXCCXXNPXACTGC

SEQ ID NO: 5365 - protein, 17 aa, Artificial Sequence
  Synthetically generated peptide
  VARIANT (1)..(17): Xaa = Any Amino Acid
CCEFXCCXXNPAXCTGC

SEQ ID NO: 5366 - protein, 17 aa, Artificial Sequence
  Synthetically generated peptide
  VARIANT (1)..(17): Xaa = Any Amino Acid
CCEFXCCXXNPACXTGC

SEQ ID NO: 5367 - protein, 17 aa, Artificial Sequence
  Synthetically generated peptide
  VARIANT (1)..(17): Xaa = Any Amino Acid
CCEFXCCXXNPACTXGC

SEQ ID NO: 5368 - protein, 17 aa, Artificial Sequence
  Synthetically generated peptide
  VARIANT (1)..(17): Xaa = Any Amino Acid
CCEFXCCXXNPACTGXC

SEQ ID NO: 5369 - protein, 16 aa, Artificial Sequence
  Synthetically generated peptide
  VARIANT (1)..(16): Xaa = Any Amino Acid
CCEFXCCXNXPACTGC

SEQ ID NO: 5370 - protein, 17 aa, Artificial Sequence
  Synthetically generated peptide
  VARIANT (1)..(17): Xaa = Any Amino Acid
CCEFXCCXNXXPACTGC

SEQ ID NO: 5371 - protein, 17 aa, Artificial Sequence
  Synthetically generated peptide
  VARIANT (1)..(17): Xaa = Any Amino Acid
CCEFXCCXNXPXACTGC

SEQ ID NO: 5372 - protein, 17 aa, Artificial Sequence
  Synthetically generated peptide
  VARIANT (1)..(17): Xaa = Any Amino Acid
CCEFXCCXNXPAXCTGC

SEQ ID NO: 5373 - protein, 17 aa, Artificial Sequence
  Synthetically generated peptide
  VARIANT (1)..(17): Xaa = Any Amino Acid
CCEFXCCXNXPACXTGC

SEQ ID NO: 5374 - protein, 17 aa, Artificial Sequence
  Synthetically generated peptide
  VARIANT (1)..(17): Xaa = Any Amino Acid
CCEFXCCXNXPACTXGC

SEQ ID NO: 5375 - protein, 17 aa, Artificial Sequence
  Synthetically generated peptide
  VARIANT (1)..(17): Xaa = Any Amino Acid
CCEFXCCXNXPACTGXC

SEQ ID NO: 5376 - protein, 16 aa, Artificial Sequence
  Synthetically generated peptide
  VARIANT (1)..(16): Xaa = Any Amino Acid
CCEFXCCXNPXACTGC

SEQ ID NO: 5377 - protein, 17 aa, Artificial Sequence
  Synthetically generated peptide
  VARIANT (1)..(17): Xaa = Any Amino Acid
CCEFXCCXNPXXACTGC

SEQ ID NO: 5378 - protein, 17 aa, Artificial Sequence
  Synthetically generated peptide
  VARIANT (1)..(17): Xaa = Any Amino Acid
CCEFXCCXNPXAXCTGC

SEQ ID NO: 5379 - protein, 17 aa, Artificial Sequence
  Synthetically generated peptide
  VARIANT (1)..(17): Xaa = Any Amino Acid
CCEFXCCXNPXACXTGC

SEQ ID NO: 5380 - protein, 17 aa, Artificial Sequence
  Synthetically generated peptide
  VARIANT (1)..(17): Xaa = Any Amino Acid
CCEFXCCXNPXACTXGC

SEQ ID NO: 5381 - protein, 17 aa, Artificial Sequence
  Synthetically generated peptide
  VARIANT (1)..(17): Xaa = Any Amino Acid
CCEFXCCXNPXACTGXC

SEQ ID NO: 5382 - protein, 16 aa, Artificial Sequence
  Synthetically generated peptide
  VARIANT (1)..(16): Xaa = Any Amino Acid
CCEFXCCXNPAXCTGC

SEQ ID NO: 5383 - protein, 17 aa, Artificial Sequence
  Synthetically generated peptide
  VARIANT (1)..(17): Xaa = Any Amino Acid
CCEFXCCXNPAXXCTGC

SEQ ID NO: 5384 - protein, 17 aa, Artificial Sequence
  Synthetically generated peptide
  VARIANT (1)..(17): Xaa = Any Amino Acid
CCEFXCCXNPAXCXTGC

SEQ ID NO: 5385 - protein, 17 aa, Artificial Sequence
  Synthetically generated peptide
  VARIANT (1)..(17): Xaa = Any Amino Acid
CCEFXCCXNPAXCTXGC

SEQ ID NO: 5386 - protein, 17 aa, Artificial Sequence
  Synthetically generated peptide
  VARIANT (1)..(17): Xaa = Any Amino Acid
CCEFXCCXNPAXCTGXC

SEQ ID NO: 5387 - protein, 16 aa, Artificial Sequence
  Synthetically generated peptide
  VARIANT (1)..(16): Xaa = Any Amino Acid
CCEFXCCXNPACXTGC

SEQ ID NO: 5388 - protein, 17 aa, Artificial Sequence
  Synthetically generated peptide
  VARIANT (1)..(17): Xaa = Any Amino Acid
CCEFXCCXNPACXXTGC

SEQ ID NO: 5389 - protein, 17 aa, Artificial Sequence
  Synthetically generated peptide
  VARIANT (1)..(17): Xaa = Any Amino Acid
CCEFXCCXNPACXTXGC

SEQ ID NO: 5390 - protein, 17 aa, Artificial Sequence
  Synthetically generated peptide
  VARIANT (1)..(17): Xaa = Any Amino Acid
CCEFXCCXNPACXTGXC

SEQ ID NO: 5391 - protein, 16 aa, Artificial Sequence
  Synthetically generated peptide
  VARIANT (1)..(16): Xaa = Any Amino Acid
CCEFXCCXNPACTXGC

SEQ ID NO: 5392 - protein, 17 aa, Artificial Sequence
  Synthetically generated peptide
  VARIANT (1)..(17): Xaa = Any Amino Acid
CCEFXCCXNPACTXXGC

SEQ ID NO: 5393 - protein, 17 aa, Artificial Sequence
  Synthetically generated peptide
  VARIANT (1)..(17): Xaa = Any Amino Acid
CCEFXCCXNPACTXGXC

SEQ ID NO: 5394 - protein, 16 aa, Artificial Sequence
  Synthetically generated peptide
  VARIANT (1)..(16): Xaa = Any Amino Acid
CCEFXCCXNPACTGXC

SEQ ID NO: 5395 - protein, 17 aa, Artificial Sequence
  Synthetically generated peptide
  VARIANT (1)..(17): Xaa = Any Amino Acid
CCEFXCCXNPACTGXXC

SEQ ID NO: 5396 - protein, 15 aa, Artificial Sequence
  Synthetically generated peptide
  VARIANT (1)..(15): Xaa = Any Amino Acid
CCEFXCCNXPACTGC

SEQ ID NO: 5397 - protein, 16 aa, Artificial Sequence
  Synthetically generated peptide
  VARIANT (1)..(16): Xaa = Any Amino Acid
CCEFXCCNXXPACTGC

SEQ ID NO: 5398 - protein, 17 aa, Artificial Sequence
  Synthetically generated peptide
  VARIANT (1)..(17): Xaa = Any Amino Acid
CCEFXCCNXXXPACTGC

SEQ ID NO: 5399 - protein, 17 aa, Artificial Sequence
  Synthetically generated peptide
  VARIANT (1)..(17): Xaa = Any Amino Acid
CCEFXCCNXXPXACTGC

SEQ ID NO: 5400 - protein, 17 aa, Artificial Sequence
  Synthetically generated peptide
  VARIANT (1)..(17): Xaa = Any Amino Acid
CCEFXCCNXXPAXCTGC

SEQ ID NO: 5401 - protein, 17 aa, Artificial Sequence
  Synthetically generated peptide
  VARIANT (1)..(17): Xaa = Any Amino Acid
CCEFXCCNXXPACXTGC

SEQ ID NO: 5402 - protein, 17 aa, Artificial Sequence
  Synthetically generated peptide
  VARIANT (1)..(17): Xaa = Any Amino Acid
CCEFXCCNXXPACTXGC

SEQ ID NO: 5403 - protein, 17 aa, Artificial Sequence
  Synthetically generated peptide
  VARIANT (1)..(17): Xaa = Any Amino Acid
CCEFXCCNXXPACTGXC

SEQ ID NO: 5404 - protein, 16 aa, Artificial Sequence
  Synthetically generated peptide
  VARIANT (1)..(16): Xaa = Any Amino Acid
CCEFXCCNXPXACTGC

SEQ ID NO: 5405 - protein, 17 aa, Artificial Sequence
  Synthetically generated peptide
  VARIANT (1)..(17): Xaa = Any Amino Acid
CCEFXCCNXPXXACTGC

SEQ ID NO: 5406 - protein, 17 aa, Artificial Sequence
  Synthetically generated peptide
  VARIANT (1)..(17): Xaa = Any Amino Acid
CCEFXCCNXPXAXCTGC

SEQ ID NO: 5407 - protein, 17 aa, Artificial Sequence
  Synthetically generated peptide
  VARIANT (1)..(17): Xaa = Any Amino Acid
CCEFXCCNXPXACXTGC

SEQ ID NO: 5408 - protein, 17 aa, Artificial Sequence
  Synthetically generated peptide
  VARIANT (1)..(17): Xaa = Any Amino Acid
CCEFXCCNXPXACTXGC

SEQ ID NO: 5409 - protein, 17 aa, Artificial Sequence
  Synthetically generated peptide
  VARIANT (1)..(17): Xaa = Any Amino Acid
CCEFXCCNXPXACTGXC

SEQ ID NO: 5410 - protein, 16 aa, Artificial Sequence
  Synthetically generated peptide
  VARIANT (1)..(16): Xaa = Any Amino Acid
CCEFXCCNXPAXCTGC

SEQ ID NO: 5411 - protein, 17 aa, Artificial Sequence
  Synthetically generated peptide
  VARIANT (1)..(17): Xaa = Any Amino Acid
CCEFXCCNXPAXXCTGC

SEQ ID NO: 5412 - protein, 17 aa, Artificial Sequence
  Synthetically generated peptide
  VARIANT (1)..(17): Xaa = Any Amino Acid
CCEFXCCNXPAXCXTGC

SEQ ID NO: 5413 - protein, 17 aa, Artificial Sequence
  Synthetically generated peptide
  VARIANT (1)..(17): Xaa = Any Amino Acid
CCEFXCCNXPAXCTXGC

SEQ ID NO: 5414 - protein, 17 aa, Artificial Sequence
  Synthetically generated peptide
  VARIANT (1)..(17): Xaa = Any Amino Acid
CCEFXCCNXPAXCTGXC

SEQ ID NO: 5415 - protein, 16 aa, Artificial Sequence
  Synthetically generated peptide
  VARIANT (1)..(16): Xaa = Any Amino Acid
CCEFXCCNXPACXTGC

SEQ ID NO: 5416 - protein, 17 aa, Artificial Sequence
  Synthetically generated peptide
  VARIANT (1)..(17): Xaa = Any Amino Acid
CCEFXCCNXPACXXTGC

SEQ ID NO: 5417 - protein, 17 aa, Artificial Sequence
  Synthetically generated peptide
  VARIANT (1)..(17): Xaa = Any Amino Acid
CCEFXCCNXPACXTXGC

SEQ ID NO: 5418 - protein, 17 aa, Artificial Sequence
  Synthetically generated peptide
  VARIANT (1)..(17): Xaa = Any Amino Acid
CCEFXCCNXPACXTGXC

SEQ ID NO: 5419 - protein, 16 aa, Artificial Sequence
  Synthetically generated peptide
  VARIANT (1)..(16): Xaa = Any Amino Acid
CCEFXCCNXPACTXGC

SEQ ID NO: 5420 - protein, 17 aa, Artificial Sequence
  Synthetically generated peptide
  VARIANT (1)..(17): Xaa = Any Amino Acid
CCEFXCCNXPACTXXGC

SEQ ID NO: 5421 - protein, 17 aa, Artificial Sequence
  Synthetically generated peptide
  VARIANT (1)..(17): Xaa = Any Amino Acid
CCEFXCCNXPACTXGXC

SEQ ID NO: 5422 - protein, 16 aa, Artificial Sequence
  Synthetically generated peptide
  VARIANT (1)..(16): Xaa = Any Amino Acid
CCEFXCCNXPACTGXC

SEQ ID NO: 5423 - protein, 17 aa, Artificial Sequence
  Synthetically generated peptide
  VARIANT (1)..(17): Xaa = Any Amino Acid
CCEFXCCNXPACTGXXC

SEQ ID NO: 5424 - protein, 15 aa, Artificial Sequence
  Synthetically generated peptide
  VARIANT (1)..(15): Xaa = Any Amino Acid
CCEFXCCNPXACTGC

SEQ ID NO: 5425 - protein, 16 aa, Artificial Sequence
  Synthetically generated peptide
  VARIANT (1)..(16): Xaa = Any Amino Acid
CCEFXCCNPXXACTGC

SEQ ID NO: 5426 - protein, 17 aa, Artificial Sequence
  Synthetically generated peptide
  VARIANT (1)..(17): Xaa = Any Amino Acid
CCEFXCCNPXXXACTGC

SEQ ID NO: 5427 - protein, 17 aa, Artificial Sequence
  Synthetically generated peptide
  VARIANT (1)..(17): Xaa = Any Amino Acid
CCEFXCCNPXXAXCTGC

SEQ ID NO: 5428 - protein, 17 aa, Artificial Sequence
  Synthetically generated peptide
  VARIANT (1)..(17): Xaa = Any Amino Acid
CCEFXCCNPXXACXTGC

SEQ ID NO: 5429 - protein, 17 aa, Artificial Sequence
  Synthetically generated peptide
  VARIANT (1)..(17): Xaa = Any Amino Acid
CCEFXCCNPXXACTXGC

SEQ ID NO: 5430 - protein, 17 aa, Artificial Sequence
  Synthetically generated peptide
  VARIANT (1)..(17): Xaa = Any Amino Acid
CCEFXCCNPXXACTGXC

SEQ ID NO: 5431 - protein, 16 aa, Artificial Sequence
  Synthetically generated peptide
  VARIANT (1)..(16): Xaa = Any Amino Acid
CCEFXCCNPXAXCTGC

SEQ ID NO: 5432 - protein, 17 aa, Artificial Sequence
  Synthetically generated peptide
  VARIANT (1)..(17): Xaa = Any Amino Acid
CCEFXCCNPXAXXCTGC

SEQ ID NO: 5433 - protein, 17 aa, Artificial Sequence
  Synthetically generated peptide
  VARIANT (1)..(17): Xaa = Any Amino Acid
CCEFXCCNPXAXCXTGC

SEQ ID NO: 5434 - protein, 17 aa, Artificial Sequence
  Synthetically generated peptide
  VARIANT (1)..(17): Xaa = Any Amino Acid
CCEFXCCNPXAXCTXGC

SEQ ID NO: 5435 - protein, 17 aa, Artificial Sequence
  Synthetically generated peptide
  VARIANT (1)..(17): Xaa = Any Amino Acid
CCEFXCCNPXAXCTGXC

SEQ ID NO: 5436 - protein, 16 aa, Artificial Sequence
  Synthetically generated peptide
  VARIANT (1)..(16): Xaa = Any Amino Acid
CCEFXCCNPXACXTGC

SEQ ID NO: 5437 - protein, 17 aa, Artificial Sequence
  Synthetically generated peptide
  VARIANT (1)..(17): Xaa = Any Amino Acid
CCEFXCCNPXACXXTGC

SEQ ID NO: 5438 - protein, 17 aa, Artificial Sequence
  Synthetically generated peptide
  VARIANT (1)..(17): Xaa = Any Amino Acid
CCEFXCCNPXACXTXGC

SEQ ID NO: 5439 - protein, 17 aa, Artificial Sequence
  Synthetically generated peptide
  VARIANT (1)..(17): Xaa = Any Amino Acid
CCEFXCCNPXACXTGXC

SEQ ID NO: 5440 - protein, 16 aa, Artificial Sequence
  Synthetically generated peptide
  VARIANT (1)..(16): Xaa = Any Amino Acid
CCEFXCCNPXACTXGC

SEQ ID NO: 5441 - protein, 17 aa, Artificial Sequence
  Synthetically generated peptide
  VARIANT (1)..(17): Xaa = Any Amino Acid
CCEFXCCNPXACTXXGC

SEQ ID NO: 5442 - protein, 17 aa, Artificial Sequence
  Synthetically generated peptide
  VARIANT (1)..(17): Xaa = Any Amino Acid
CCEFXCCNPXACTXGXC

SEQ ID NO: 5443 - protein, 16 aa, Artificial Sequence
  Synthetically generated peptide
  VARIANT (1)..(16): Xaa = Any Amino Acid
CCEFXCCNPXACTGXC

SEQ ID NO: 5444 - protein, 17 aa, Artificial Sequence
  Synthetically generated peptide
  VARIANT (1)..(17): Xaa = Any Amino Acid
CCEFXCCNPXACTGXXC

SEQ ID NO: 5445 - protein, 15 aa, Artificial Sequence
  Synthetically generated peptide
  VARIANT (1)..(15): Xaa = Any Amino Acid
CCEFXCCNPAXCTGC

SEQ ID NO: 5446 - protein, 16 aa, Artificial Sequence
  Synthetically generated peptide
  VARIANT (1)..(16): Xaa = Any Amino Acid
CCEFXCCNPAXXCTGC

SEQ ID NO: 5447 - protein, 17 aa, Artificial Sequence
  Synthetically generated peptide
  VARIANT (1)..(17): Xaa = Any Amino Acid
CCEFXCCNPAXXXCTGC

SEQ ID NO: 5448 - protein, 17 aa, Artificial Sequence
  Synthetically generated peptide
  VARIANT (1)..(17): Xaa = Any Amino Acid
CCEFXCCNPAXXCXTGC

SEQ ID NO: 5449 - protein, 17 aa, Artificial Sequence
  Synthetically generated peptide
  VARIANT (1)..(17): Xaa = Any Amino Acid
CCEFXCCNPAXXCTXGC

SEQ ID NO: 5450 - protein, 17 aa, Artificial Sequence
  Synthetically generated peptide
  VARIANT (1)..(17): Xaa = Any Amino Acid
CCEFXCCNPAXXCTGXC

SEQ ID NO: 5451 - protein, 16 aa, Artificial Sequence
  Synthetically generated peptide
  VARIANT (1)..(16): Xaa = Any Amino Acid
CCEFXCCNPAXCXTGC

SEQ ID NO: 5452 - protein, 17 aa, Artificial Sequence
  Synthetically generated peptide
  VARIANT (1)..(17): Xaa = Any Amino Acid
CCEFXCCNPAXCXXTGC

SEQ ID NO: 5453 - protein, 17 aa, Artificial Sequence
  Synthetically generated peptide
  VARIANT (1)..(17): Xaa = Any Amino Acid
CCEFXCCNPAXCXTXGC

SEQ ID NO: 5454 - protein, 17 aa, Artificial Sequence
  Synthetically generated peptide
  VARIANT (1)..(17): Xaa = Any Amino Acid
CCEFXCCNPAXCXTGXC

SEQ ID NO: 5455 - protein, 16 aa, Artificial Sequence
  Synthetically generated peptide
  VARIANT (1)..(16): Xaa = Any Amino Acid
CCEFXCCNPAXCTXGC

SEQ ID NO: 5456 - protein, 17 aa, Artificial Sequence
  Synthetically generated peptide
  VARIANT (1)..(17): Xaa = Any Amino Acid
CCEFXCCNPAXCTXXGC

SEQ ID NO: 5457 - protein, 17 aa, Artificial Sequence
  Synthetically generated peptide
  VARIANT (1)..(17): Xaa = Any Amino Acid
CCEFXCCNPAXCTXGXC

SEQ ID NO: 5458 - protein, 16 aa, Artificial Sequence
  Synthetically generated peptide
  VARIANT (1)..(16): Xaa = Any Amino Acid
CCEFXCCNPAXCTGXC

SEQ ID NO: 5459 - protein, 17 aa, Artificial Sequence
  Synthetically generated peptide
  VARIANT (1)..(17): Xaa = Any Amino Acid
CCEFXCCNPAXCTGXXC

SEQ ID NO: 5460 - protein, 15 aa, Artificial Sequence
  Synthetically generated peptide
  VARIANT (1)..(15): Xaa = Any Amino Acid
CCEFXCCNPACXTGC

SEQ ID NO: 5461 - protein, 16 aa, Artificial Sequence
  Synthetically generated peptide
  VARIANT (1)..(16): Xaa = Any Amino Acid
CCEFXCCNPACXXTGC

SEQ ID NO: 5462 - protein, 17 aa, Artificial Sequence
  Synthetically generated peptide
  VARIANT (1)..(17): Xaa = Any Amino Acid
CCEFXCCNPACXXXTGC

SEQ ID NO: 5463 - protein, 17 aa, Artificial Sequence
  Synthetically generated peptide
  VARIANT (1)..(17): Xaa = Any Amino Acid
CCEFXCCNPACXXTXGC

SEQ ID NO: 5464 - protein, 17 aa, Artificial Sequence
  Synthetically generated peptide
  VARIANT (1)..(17): Xaa = Any Amino Acid
CCEFXCCNPACXXTGXC

SEQ ID NO: 5465 - protein, 16 aa, Artificial Sequence
  Synthetically generated peptide
  VARIANT (1)..(16): Xaa = Any Amino Acid
CCEFXCCNPACXTXGC

SEQ ID NO: 5466 - protein, 17 aa, Artificial Sequence
  Synthetically generated peptide
  VARIANT (1)..(17): Xaa = Any Amino Acid
CCEFXCCNPACXTXXGC

SEQ ID NO: 5467 - protein, 17 aa, Artificial Sequence
  Synthetically generated peptide
  VARIANT (1)..(17): Xaa = Any Amino Acid
CCEFXCCNPACXTXGXC

SEQ ID NO: 5468 - protein, 16 aa, Artificial Sequence
  Synthetically generated peptide
  VARIANT (1)..(16): Xaa = Any Amino Acid
CCEFXCCNPACXTGXC

SEQ ID NO: 5469 - protein, 17 aa, Artificial Sequence
  Synthetically generated peptide
  VARIANT (1)..(17): Xaa = Any Amino Acid
CCEFXCCNPACXTGXXC

SEQ ID NO: 5470 - protein, 15 aa, Artificial Sequence
  Synthetically generated peptide
  VARIANT (1)..(15): Xaa = Any Amino Acid
CCEFXCCNPACTXGC

SEQ ID NO: 5471 - protein, 16 aa, Artificial Sequence
  Synthetically generated peptide
  VARIANT (1)..(16): Xaa = Any Amino Acid
CCEFXCCNPACTXXGC

SEQ ID NO: 5472 - protein, 17 aa, Artificial Sequence
  Synthetically generated peptide
  VARIANT (1)..(17): Xaa = Any Amino Acid
CCEFXCCNPACTXXXGC

SEQ ID NO: 5473 - protein, 17 aa, Artificial Sequence
  Synthetically generated peptide
  VARIANT (1)..(17): Xaa = Any Amino Acid
CCEFXCCNPACTXXGXC

SEQ ID NO: 5474 - protein, 16 aa, Artificial Sequence
  Synthetically generated peptide
  VARIANT (1)..(16): Xaa = Any Amino Acid
CCEFXCCNPACTXGXC

SEQ ID NO: 5475 - protein, 17 aa, Artificial Sequence
  Synthetically generated peptide
  VARIANT (1)..(17): Xaa = Any Amino Acid
CCEFXCCNPACTXGXXC

SEQ ID NO: 5476 - protein, 15 aa, Artificial Sequence
  Synthetically generated peptide
  VARIANT (1)..(15): Xaa = Any Amino Acid
CCEFXCCNPACTGXC

SEQ ID NO: 5477 - protein, 16 aa, Artificial Sequence
  Synthetically generated peptide
  VARIANT (1)..(16): Xaa = Any Amino Acid
CCEFXCCNPACTGXXC

SEQ ID NO: 5478 - protein, 17 aa, Artificial Sequence
  Synthetically generated peptide
  VARIANT (1)..(17): Xaa = Any Amino Acid
CCEFXCCNPACTGXXXC

SEQ ID NO: 5479 - protein, 14 aa, Artificial Sequence
  Synthetically generated peptide
  VARIANT (1)..(14): Xaa = Any Amino Acid
CCEFCCXNPACTGC

SEQ ID NO: 5480 - protein, 15 aa, Artificial Sequence
  Synthetically generated peptide
  VARIANT (1)..(15): Xaa = Any Amino Acid
CCEFCCXXNPACTGC

SEQ ID NO: 5481 - protein, 16 aa, Artificial Sequence
  Synthetically generated peptide
  VARIANT (1)..(16): Xaa = Any Amino Acid
CCEFCCXXXNPACTGC

SEQ ID NO: 5482 - protein, 17 aa, Artificial Sequence
  Synthetically generated peptide
  VARIANT (1)..(17): Xaa = Any Amino Acid
CCEFCCXXXXNPACTGC

SEQ ID NO: 5483 - protein, 17 aa, Artificial Sequence
  Synthetically generated peptide
  VARIANT (1)..(17): Xaa = Any Amino Acid
CCEFCCXXXNXPACTGC

SEQ ID NO: 5484 - protein, 17 aa, Artificial Sequence
  Synthetically generated peptide
  VARIANT (1)..(17): Xaa = Any Amino Acid
CCEFCCXXXNPXACTGC

SEQ ID NO: 5485 - protein, 17 aa, Artificial Sequence
  Synthetically generated peptide
  VARIANT (1)..(17): Xaa = Any Amino Acid
CCEFCCXXXNPAXCTGC

SEQ ID NO: 5486 - protein, 17 aa, Artificial Sequence
  Synthetically generated peptide
  VARIANT (1)..(17): Xaa = Any Amino Acid
CCEFCCXXXNPACXTGC

SEQ ID NO: 5487 - protein, 17 aa, Artificial Sequence
  Synthetically generated peptide
  VARIANT (1)..(17): Xaa = Any Amino Acid
CCEFCCXXXNPACTXGC

SEQ ID NO: 5488 - protein, 17 aa, Artificial Sequence
  Synthetically generated peptide
  VARIANT (1)..(17): Xaa = Any Amino Acid
CCEFCCXXXNPACTGXC

SEQ ID NO: 5489 - protein, 16 aa, Artificial Sequence
  Synthetically generated peptide
  VARIANT (1)..(16): Xaa = Any Amino Acid
CCEFCCXXNXPACTGC

SEQ ID NO: 5490 - protein, 17 aa, Artificial Sequence
  Synthetically generated peptide
  VARIANT (1)..(17): Xaa = Any Amino Acid
CCEFCCXXNXXPACTGC

SEQ ID NO: 5491 - protein, 17 aa, Artificial Sequence
  Synthetically generated peptide
  VARIANT (1)..(17): Xaa = Any Amino Acid
CCEFCCXXNXPXACTGC

SEQ ID NO: 5492 - protein, 17 aa, Artificial Sequence
  Synthetically generated peptide
  VARIANT (1)..(17): Xaa = Any Amino Acid
CCEFCCXXNXPAXCTGC

SEQ ID NO: 5493 - protein, 17 aa, Artificial Sequence
  Synthetically generated peptide
  VARIANT (1)..(17): Xaa = Any Amino Acid
CCEFCCXXNXPACXTGC

SEQ ID NO: 5494 - protein, 17 aa, Artificial Sequence
  Synthetically generated peptide
  VARIANT (1)..(17): Xaa = Any Amino Acid
CCEFCCXXNXPACTXGC

SEQ ID NO: 5495 - protein, 17 aa, Artificial Sequence
  Synthetically generated peptide
  VARIANT (1)..(17): Xaa = Any Amino Acid
CCEFCCXXNXPACTGXC

SEQ ID NO: 5496 - protein, 16 aa, Artificial Sequence
  Synthetically generated peptide
  VARIANT (1)..(16): Xaa = Any Amino Acid
CCEFCCXXNPXACTGC

SEQ ID NO: 5497 - protein, 17 aa, Artificial Sequence
  Synthetically generated peptide
  VARIANT (1)..(17): Xaa = Any Amino Acid
CCEFCCXXNPXXACTGC

SEQ ID NO: 5498 - protein, 17 aa, Artificial Sequence
  Synthetically generated peptide
  VARIANT (1)..(17): Xaa = Any Amino Acid
CCEFCCXXNPXAXCTGC

SEQ ID NO: 5499 - protein, 17 aa, Artificial Sequence
  Synthetically generated peptide
  VARIANT (1)..(17): Xaa = Any Amino Acid
CCEFCCXXNPXACXTGC

SEQ ID NO: 5500 - protein, 17 aa, Artificial Sequence
  Synthetically generated peptide
  VARIANT (1)..(17): Xaa = Any Amino Acid
CCEFCCXXNPXACTXGC

SEQ ID NO: 5501 - protein, 17 aa, Artificial Sequence
  Synthetically generated peptide
  VARIANT (1)..(17): Xaa = Any Amino Acid
CCEFCCXXNPXACTGXC

SEQ ID NO: 5502 - protein, 16 aa, Artificial Sequence
  Synthetically generated peptide
  VARIANT (1)..(16): Xaa = Any Amino Acid
CCEFCCXXNPAXCTGC

SEQ ID NO: 5503 - protein, 17 aa, Artificial Sequence
  Synthetically generated peptide
  VARIANT (1)..(17): Xaa = Any Amino Acid
CCEFCCXXNPAXXCTGC

SEQ ID NO: 5504 - protein, 17 aa, Artificial Sequence
  Synthetically generated peptide
  VARIANT (1)..(17): Xaa = Any Amino Acid
CCEFCCXXNPAXCXTGC

SEQ ID NO: 5505 - protein, 17 aa, Artificial Sequence
  Synthetically generated peptide
  VARIANT (1)..(17): Xaa = Any Amino Acid
CCEFCCXXNPAXCTXGC

SEQ ID NO: 5506 - protein, 17 aa, Artificial Sequence
  Synthetically generated peptide
  VARIANT (1)..(17): Xaa = Any Amino Acid
CCEFCCXXNPAXCTGXC

SEQ ID NO: 5507 - protein, 16 aa, Artificial Sequence
  Synthetically generated peptide
  VARIANT (1)..(16): Xaa = Any Amino Acid
CCEFCCXXNPACXTGC

SEQ ID NO: 5508 - protein, 17 aa, Artificial Sequence
  Synthetically generated peptide
  VARIANT (1)..(17): Xaa = Any Amino Acid
CCEFCCXXNPACXXTGC

SEQ ID NO: 5509 - protein, 17 aa, Artificial Sequence
  Synthetically generated peptide
  VARIANT (1)..(17): Xaa = Any Amino Acid
CCEFCCXXNPACXTXGC

SEQ ID NO: 5510 - protein, 17 aa, Artificial Sequence
  Synthetically generated peptide
  VARIANT (1)..(17): Xaa = Any Amino Acid
CCEFCCXXNPACXTGXC

SEQ ID NO: 5511 - protein, 16 aa, Artificial Sequence
  Synthetically generated peptide
  VARIANT (1)..(16): Xaa = Any Amino Acid
CCEFCCXXNPACTXGC

SEQ ID NO: 5512 - protein, 17 aa, Artificial Sequence
  Synthetically generated peptide
  VARIANT (1)..(17): Xaa = Any Amino Acid
CCEFCCXXNPACTXXGC

SEQ ID NO: 5513 - protein, 17 aa, Artificial Sequence
  Synthetically generated peptide
  VARIANT (1)..(17): Xaa = Any Amino Acid
CCEFCCXXNPACTXGXC

SEQ ID NO: 5514 - protein, 16 aa, Artificial Sequence
  Synthetically generated peptide
  VARIANT (1)..(16): Xaa = Any Amino Acid
CCEFCCXXNPACTGXC

SEQ ID NO: 5515 - protein, 17 aa, Artificial Sequence
  Synthetically generated peptide
  VARIANT (1)..(17): Xaa = Any Amino Acid
CCEFCCXXNPACTGXXC

SEQ ID NO: 5516 - protein, 15 aa, Artificial Sequence
  Synthetically generated peptide
  VARIANT (1)..(15): Xaa = Any Amino Acid
CCEFCCXNXPACTGC

SEQ ID NO: 5517 - protein, 16 aa, Artificial Sequence
  Synthetically generated peptide
  VARIANT (1)..(16): Xaa = Any Amino Acid
CCEFCCXNXXPACTGC

SEQ ID NO: 5518 - protein, 17 aa, Artificial Sequence
  Synthetically generated peptide
  VARIANT (1)..(17): Xaa = Any Amino Acid
CCEFCCXNXXXPACTGC

SEQ ID NO: 5519 - protein, 17 aa, Artificial Sequence
  Synthetically generated peptide
  VARIANT (1)..(17): Xaa = Any Amino Acid
CCEFCCXNXXPXACTGC

SEQ ID NO: 5520 - protein, 17 aa, Artificial Sequence
  Synthetically generated peptide
  VARIANT (1)..(17): Xaa = Any Amino Acid
CCEFCCXNXXPAXCTGC

SEQ ID NO: 5521 - protein, 17 aa, Artificial Sequence
  Synthetically generated peptide
  VARIANT (1)..(17): Xaa = Any Amino Acid
CCEFCCXNXXPACXTGC

SEQ ID NO: 5522 - protein, 17 aa, Artificial Sequence
  Synthetically generated peptide
  VARIANT (1)..(17): Xaa = Any Amino Acid
CCEFCCXNXXPACTXGC

SEQ ID NO: 5523 - protein, 17 aa, Artificial Sequence
  Synthetically generated peptide
  VARIANT (1)..(17): Xaa = Any Amino Acid
CCEFCCXNXXPACTGXC

SEQ ID NO: 5524 - protein, 16 aa, Artificial Sequence
  Synthetically generated peptide
  VARIANT (1)..(16): Xaa = Any Amino Acid
CCEFCCXNXPXACTGC

SEQ ID NO: 5525 - protein, 17 aa, Artificial Sequence
  Synthetically generated peptide
  VARIANT (1)..(17): Xaa = Any Amino Acid
CCEFCCXNXPXXACTGC

SEQ ID NO: 5526 - protein, 17 aa, Artificial Sequence
  Synthetically generated peptide
  VARIANT (1)..(17): Xaa = Any Amino Acid
CCEFCCXNXPXAXCTGC

SEQ ID NO: 5527 - protein, 17 aa, Artificial Sequence
  Synthetically generated peptide
  VARIANT (1)..(17): Xaa = Any Amino Acid
CCEFCCXNXPXACXTGC

SEQ ID NO: 5528 - protein, 17 aa, Artificial Sequence
  Synthetically generated peptide
  VARIANT (1)..(17): Xaa = Any Amino Acid
CCEFCCXNXPXACTXGC

SEQ ID NO: 5529 - protein, 17 aa, Artificial Sequence
  Synthetically generated peptide
  VARIANT (1)..(17): Xaa = Any Amino Acid
CCEFCCXNXPXACTGXC

SEQ ID NO: 5530 - protein, 16 aa, Artificial Sequence
  Synthetically generated peptide
  VARIANT (1)..(16): Xaa = Any Amino Acid
CCEFCCXNXPAXCTGC

SEQ ID NO: 5531 - protein, 17 aa, Artificial Sequence
  Synthetically generated peptide
  VARIANT (1)..(17): Xaa = Any Amino Acid
CCEFCCXNXPAXXCTGC

SEQ ID NO: 5532 - protein, 17 aa, Artificial Sequence
  Synthetically generated peptide
  VARIANT (1)..(17): Xaa = Any Amino Acid
CCEFCCXNXPAXCXTGC

SEQ ID NO: 5533 - protein, 17 aa, Artificial Sequence
  Synthetically generated peptide
  VARIANT (1)..(17): Xaa = Any Amino Acid
CCEFCCXNXPAXCTXGC

SEQ ID NO: 5534 - protein, 17 aa, Artificial Sequence
  Synthetically generated peptide
  VARIANT (1)..(17): Xaa = Any Amino Acid
CCEFCCXNXPAXCTGXC

SEQ ID NO: 5535 - protein, 16 aa, Artificial Sequence
  Synthetically generated peptide
  VARIANT (1)..(16): Xaa = Any Amino Acid
CCEFCCXNXPACXTGC

SEQ ID NO: 5536 - protein, 17 aa, Artificial Sequence
  Synthetically generated peptide
  VARIANT (1)..(17): Xaa = Any Amino Acid
CCEFCCXNXPACXXTGC

SEQ ID NO: 5537 - protein, 17 aa, Artificial Sequence
  Synthetically generated peptide
  VARIANT (1)..(17): Xaa = Any Amino Acid
CCEFCCXNXPACXTXGC

SEQ ID NO: 5538 - protein, 17 aa, Artificial Sequence
  Synthetically generated peptide
  VARIANT (1)..(17): Xaa = Any Amino Acid
CCEFCCXNXPACXTGXC

SEQ ID NO: 5539 - protein, 16 aa, Artificial Sequence
  Synthetically generated peptide
  VARIANT (1)..(16): Xaa = Any Amino Acid
CCEFCCXNXPACTXGC

SEQ ID NO: 5540 - protein, 17 aa, Artificial Sequence
  Synthetically generated peptide
  VARIANT (1)..(17): Xaa = Any Amino Acid
CCEFCCXNXPACTXXGC

SEQ ID NO: 5541 - protein, 17 aa, Artificial Sequence
  Synthetically generated peptide
  VARIANT (1)..(17): Xaa = Any Amino Acid
CCEFCCXNXPACTXGXC

SEQ ID NO: 5542 - protein, 16 aa, Artificial Sequence
  Synthetically generated peptide
  VARIANT (1)..(16): Xaa = Any Amino Acid
CCEFCCXNXPACTGXC

SEQ ID NO: 5543 - protein, 17 aa, Artificial Sequence
  Synthetically generated peptide
  VARIANT (1)..(17): Xaa = Any Amino Acid
CCEFCCXNXPACTGXXC

SEQ ID NO: 5544 - protein, 15 aa, Artificial Sequence
  Synthetically generated peptide
  VARIANT (1)..(15): Xaa = Any Amino Acid
CCEFCCXNPXACTGC

SEQ ID NO: 5545 - protein, 16 aa, Artificial Sequence
  Synthetically generated peptide
  VARIANT (1)..(16): Xaa = Any Amino Acid
CCEFCCXNPXXACTGC

SEQ ID NO: 5546 - protein, 17 aa, Artificial Sequence
  Synthetically generated peptide
  VARIANT (1)..(17): Xaa = Any Amino Acid
CCEFCCXNPXXXACTGC

SEQ ID NO: 5547 - protein, 17 aa, Artificial Sequence
  Synthetically generated peptide
  VARIANT (1)..(17): Xaa = Any Amino Acid
CCEFCCXNPXXAXCTGC

SEQ ID NO: 5548 - protein, 17 aa, Artificial Sequence
  Synthetically generated peptide
  VARIANT (1)..(17): Xaa = Any Amino Acid
CCEFCCXNPXXACXTGC

SEQ ID NO: 5549 - protein, 17 aa, Artificial Sequence
  Synthetically generated peptide
  VARIANT (1)..(17): Xaa = Any Amino Acid
CCEFCCXNPXXACTXGC

SEQ ID NO: 5550 - protein, 17 aa, Artificial Sequence
  Synthetically generated peptide
  VARIANT (1)..(17): Xaa = Any Amino Acid
CCEFCCXNPXXACTGXC

SEQ ID NO: 5551 - protein, 16 aa, Artificial Sequence
  Synthetically generated peptide
  VARIANT (1)..(16): Xaa = Any Amino Acid
CCEFCCXNPXAXCTGC

SEQ ID NO: 5552 - protein, 17 aa, Artificial Sequence
  Synthetically generated peptide
  VARIANT (1)..(17): Xaa = Any Amino Acid
CCEFCCXNPXAXXCTGC

SEQ ID NO: 5553 - protein, 17 aa, Artificial Sequence
  Synthetically generated peptide
  VARIANT (1)..(17): Xaa = Any Amino Acid
CCEFCCXNPXAXCXTGC

SEQ ID NO: 5554 - protein, 17 aa, Artificial Sequence
  Synthetically generated peptide
  VARIANT (1)..(17): Xaa = Any Amino Acid
CCEFCCXNPXAXCTXGC

SEQ ID NO: 5555 - protein, 17 aa, Artificial Sequence
  Synthetically generated peptide
  VARIANT (1)..(17): Xaa = Any Amino Acid
CCEFCCXNPXAXCTGXC

SEQ ID NO: 5556 - protein, 16 aa, Artificial Sequence
  Synthetically generated peptide
  VARIANT (1)..(16): Xaa = Any Amino Acid
CCEFCCXNPXACXTGC

SEQ ID NO: 5557 - protein, 17 aa, Artificial Sequence
  Synthetically generated peptide
  VARIANT (1)..(17): Xaa = Any Amino Acid
CCEFCCXNPXACXXTGC

SEQ ID NO: 5558 - protein, 17 aa, Artificial Sequence
  Synthetically generated peptide
  VARIANT (1)..(17): Xaa = Any Amino Acid
CCEFCCXNPXACXTXGC

SEQ ID NO: 5559 - protein, 17 aa, Artificial Sequence
  Synthetically generated peptide
  VARIANT (1)..(17): Xaa = Any Amino Acid
CCEFCCXNPXACXTGXC

SEQ ID NO: 5560 - protein, 16 aa, Artificial Sequence
  Synthetically generated peptide
  VARIANT (1)..(16): Xaa = Any Amino Acid
CCEFCCXNPXACTXGC

SEQ ID NO: 5561 - protein, 17 aa, Artificial Sequence
  Synthetically generated peptide
  VARIANT (1)..(17): Xaa = Any Amino Acid
CCEFCCXNPXACTXXGC

SEQ ID NO: 5562 - protein, 17 aa, Artificial Sequence
  Synthetically generated peptide
  VARIANT (1)..(17): Xaa = Any Amino Acid
CCEFCCXNPXACTXGXC

SEQ ID NO: 5563 - protein, 16 aa, Artificial Sequence
  Synthetically generated peptide
  VARIANT (1)..(16): Xaa = Any Amino Acid
CCEFCCXNPXACTGXC

SEQ ID NO: 5564 - protein, 17 aa, Artificial Sequence
  Synthetically generated peptide
  VARIANT (1)..(17): Xaa = Any Amino Acid
CCEFCCXNPXACTGXXC

SEQ ID NO: 5565 - protein, 15 aa, Artificial Sequence
  Synthetically generated peptide
  VARIANT (1)..(15): Xaa = Any Amino Acid
CCEFCCXNPAXCTGC

SEQ ID NO: 5566 - protein, 16 aa, Artificial Sequence
  Synthetically generated peptide
  VARIANT (1)..(16): Xaa = Any Amino Acid
CCEFCCXNPAXXCTGC

SEQ ID NO: 5567 - protein, 17 aa, Artificial Sequence
  Synthetically generated peptide
  VARIANT (1)..(17): Xaa = Any Amino Acid
CCEFCCXNPAXXXCTGC

SEQ ID NO: 5568 - protein, 17 aa, Artificial Sequence
  Synthetically generated peptide
  VARIANT (1)..(17): Xaa = Any Amino Acid
CCEFCCXNPAXXCXTGC

SEQ ID NO: 5569 - protein, 17 aa, Artificial Sequence
  Synthetically generated peptide
  VARIANT (1)..(17): Xaa = Any Amino Acid
CCEFCCXNPAXXCTXGC

SEQ ID NO: 5570 - protein, 17 aa, Artificial Sequence
  Synthetically generated peptide
  VARIANT (1)..(17): Xaa = Any Amino Acid
CCEFCCXNPAXXCTGXC

SEQ ID NO: 5571 - protein, 16 aa, Artificial Sequence
  Synthetically generated peptide
  VARIANT (1)..(16): Xaa = Any Amino Acid
CCEFCCXNPAXCXTGC

SEQ ID NO: 5572 - protein, 17 aa, Artificial Sequence
  Synthetically generated peptide
  VARIANT (1)..(17): Xaa = Any Amino Acid
CCEFCCXNPAXCXXTGC

SEQ ID NO: 5573 - protein, 17 aa, Artificial Sequence
  Synthetically generated peptide
  VARIANT (1)..(17): Xaa = Any Amino Acid
CCEFCCXNPAXCXTXGC

SEQ ID NO: 5574 - protein, 17 aa, Artificial Sequence
  Synthetically generated peptide
  VARIANT (1)..(17): Xaa = Any Amino Acid
CCEFCCXNPAXCXTGXC

SEQ ID NO: 5575 - protein, 16 aa, Artificial Sequence
  Synthetically generated peptide
  VARIANT (1)..(16): Xaa = Any Amino Acid
CCEFCCXNPAXCTXGC

SEQ ID NO: 5576 - protein, 17 aa, Artificial Sequence
  Synthetically generated peptide
  VARIANT (1)..(17): Xaa = Any Amino Acid
CCEFCCXNPAXCTXXGC

SEQ ID NO: 5577 - protein, 17 aa, Artificial Sequence
  Synthetically generated peptide
  VARIANT (1)..(17): Xaa = Any Amino Acid
CCEFCCXNPAXCTXGXC

SEQ ID NO: 5578 - protein, 16 aa, Artificial Sequence
  Synthetically generated peptide
  VARIANT (1)..(16): Xaa = Any Amino Acid
CCEFCCXNPAXCTGXC

SEQ ID NO: 5579 - protein, 17 aa, Artificial Sequence
  Synthetically generated peptide
  VARIANT (1)..(17): Xaa = Any Amino Acid
CCEFCCXNPAXCTGXXC

SEQ ID NO: 5580 - protein, 15 aa, Artificial Sequence
  Synthetically generated peptide
  VARIANT (1)..(15): Xaa = Any Amino Acid
CCEFCCXNPACXTGC

SEQ ID NO: 5581 - protein, 16 aa, Artificial Sequence
  Synthetically generated peptide
  VARIANT (1)..(16): Xaa = Any Amino Acid
CCEFCCXNPACXXTGC

SEQ ID NO: 5582 - protein, 17 aa, Artificial Sequence
  Synthetically generated peptide
  VARIANT (1)..(17): Xaa = Any Amino Acid
CCEFCCXNPACXXXTGC

SEQ ID NO: 5583 - protein, 17 aa, Artificial Sequence
  Synthetically generated peptide
  VARIANT (1)..(17): Xaa = Any Amino Acid
CCEFCCXNPACXXTXGC

SEQ ID NO: 5584 - protein, 17 aa, Artificial Sequence
  Synthetically generated peptide
  VARIANT (1)..(17): Xaa = Any Amino Acid
CCEFCCXNPACXXTGXC

SEQ ID NO: 5585 - protein, 16 aa, Artificial Sequence
  Synthetically generated peptide
  VARIANT (1)..(16): Xaa = Any Amino Acid
CCEFCCXNPACXTXGC

SEQ ID NO: 5586 - protein, 17 aa, Artificial Sequence
  Synthetically generated peptide
  VARIANT (1)..(17): Xaa = Any Amino Acid
CCEFCCXNPACXTXXGC

SEQ ID NO: 5587 - protein, 17 aa, Artificial Sequence
  Synthetically generated peptide
  VARIANT (1)..(17): Xaa = Any Amino Acid
CCEFCCXNPACXTXGXC

SEQ ID NO: 5588 - protein, 16 aa, Artificial Sequence
  Synthetically generated peptide
  VARIANT (1)..(16): Xaa = Any Amino Acid
CCEFCCXNPACXTGXC

SEQ ID NO: 5589 - protein, 17 aa, Artificial Sequence
  Synthetically generated peptide
  VARIANT (1)..(17): Xaa = Any Amino Acid
CCEFCCXNPACXTGXXC

SEQ ID NO: 5590 - protein, 15 aa, Artificial Sequence
  Synthetically generated peptide
  VARIANT (1)..(15): Xaa = Any Amino Acid
CCEFCCXNPACTXGC

SEQ ID NO: 5591 - protein, 16 aa, Artificial Sequence
  Synthetically generated peptide
  VARIANT (1)..(16): Xaa = Any Amino Acid
CCEFCCXNPACTXXGC

SEQ ID NO: 5592 - protein, 17 aa, Artificial Sequence
  Synthetically generated peptide
  VARIANT (1)..(17): Xaa = Any Amino Acid
CCEFCCXNPACTXXXGC

SEQ ID NO: 5593 - protein, 17 aa, Artificial Sequence
  Synthetically generated peptide
  VARIANT (1)..(17): Xaa = Any Amino Acid
CCEFCCXNPACTXXGXC

SEQ ID NO: 5594 - protein, 16 aa, Artificial Sequence
  Synthetically generated peptide
  VARIANT (1)..(16): Xaa = Any Amino Acid
CCEFCCXNPACTXGXC

SEQ ID NO: 5595 - protein, 17 aa, Artificial Sequence
  Synthetically generated peptide
  VARIANT (1)..(17): Xaa = Any Amino Acid
CCEFCCXNPACTXGXXC

SEQ ID NO: 5596 - protein, 15 aa, Artificial Sequence
  Synthetically generated peptide
  VARIANT (1)..(15): Xaa = Any Amino Acid
CCEFCCXNPACTGXC

SEQ ID NO: 5597 - protein, 16 aa, Artificial Sequence
  Synthetically generated peptide
  VARIANT (1)..(16): Xaa = Any Amino Acid
CCEFCCXNPACTGXXC

SEQ ID NO: 5598 - protein, 17 aa, Artificial Sequence
  Synthetically generated peptide
  VARIANT (1)..(17): Xaa = Any Amino Acid
CCEFCCXNPACTGXXXC

SEQ ID NO: 5599 - protein, 14 aa, Artificial Sequence
  Synthetically generated peptide
  VARIANT (1)..(14): Xaa = Any Amino Acid
CCEFCCNXPACTGC

SEQ ID NO: 5600 - protein, 15 aa, Artificial Sequence
  Synthetically generated peptide
  VARIANT (1)..(15): Xaa = Any Amino Acid
CCEFCCNXXPACTGC

SEQ ID NO: 5601 - protein, 16 aa, Artificial Sequence
  Synthetically generated peptide
  VARIANT (1)..(16): Xaa = Any Amino Acid
CCEFCCNXXXPACTGC

SEQ ID NO: 5602 - protein, 17 aa, Artificial Sequence
  Synthetically generated peptide
  VARIANT (1)..(17): Xaa = Any Amino Acid
CCEFCCNXXXXPACTGC

SEQ ID NO: 5603 - protein, 17 aa, Artificial Sequence
  Synthetically generated peptide
  VARIANT (1)..(17): Xaa = Any Amino Acid
CCEFCCNXXXPXACTGC

SEQ ID NO: 5604 - protein, 17 aa, Artificial Sequence
  Synthetically generated peptide
  VARIANT (1)..(17): Xaa = Any Amino Acid
CCEFCCNXXXPAXCTGC

SEQ ID NO: 5605 - protein, 17 aa, Artificial Sequence
  Synthetically generated peptide
  VARIANT (1)..(17): Xaa = Any Amino Acid
CCEFCCNXXXPACXTGC

SEQ ID NO: 5606 - protein, 17 aa, Artificial Sequence
  Synthetically generated peptide
  VARIANT (1)..(17): Xaa = Any Amino Acid
CCEFCCNXXXPACTXGC

SEQ ID NO: 5607 - protein, 17 aa, Artificial Sequence
  Synthetically generated peptide
  VARIANT (1)..(17): Xaa = Any Amino Acid
CCEFCCNXXXPACTGXC

SEQ ID NO: 5608 - protein, 16 aa, Artificial Sequence
  Synthetically generated peptide
  VARIANT (1)..(16): Xaa = Any Amino Acid
CCEFCCNXXPXACTGC

SEQ ID NO: 5609 - protein, 17 aa, Artificial Sequence
  Synthetically generated peptide
  VARIANT (1)..(17): Xaa = Any Amino Acid
CCEFCCNXXPXXACTGC

SEQ ID NO: 5610 - protein, 17 aa, Artificial Sequence
  Synthetically generated peptide
  VARIANT (1)..(17): Xaa = Any Amino Acid
CCEFCCNXXPXAXCTGC

SEQ ID NO: 5611 - protein, 17 aa, Artificial Sequence
  Synthetically generated peptide
  VARIANT (1)..(17): Xaa = Any Amino Acid
CCEFCCNXXPXACXTGC

SEQ ID NO: 5612 - protein, 17 aa, Artificial Sequence
  Synthetically generated peptide
  VARIANT (1)..(17): Xaa = Any Amino Acid
CCEFCCNXXPXACTXGC

SEQ ID NO: 5613 - protein, 17 aa, Artificial Sequence
  Synthetically generated peptide
  VARIANT (1)..(17): Xaa = Any Amino Acid
CCEFCCNXXPXACTGXC

SEQ ID NO: 5614 - protein, 16 aa, Artificial Sequence
  Synthetically generated peptide
  VARIANT (1)..(16): Xaa = Any Amino Acid
CCEFCCNXXPAXCTGC

SEQ ID NO: 5615 - protein, 17 aa, Artificial Sequence
  Synthetically generated peptide
  VARIANT (1)..(17): Xaa = Any Amino Acid
CCEFCCNXXPAXXCTGC

SEQ ID NO: 5616 - protein, 17 aa, Artificial Sequence
  Synthetically generated peptide
  VARIANT (1)..(17): Xaa = Any Amino Acid
CCEFCCNXXPAXCXTGC

SEQ ID NO: 5617 - protein, 17 aa, Artificial Sequence
  Synthetically generated peptide
  VARIANT (1)..(17): Xaa = Any Amino Acid
CCEFCCNXXPAXCTXGC

SEQ ID NO: 5618 - protein, 17 aa, Artificial Sequence
  Synthetically generated peptide
  VARIANT (1)..(17): Xaa = Any Amino Acid
CCEFCCNXXPAXCTGXC

SEQ ID NO: 5619 - protein, 16 aa, Artificial Sequence
  Synthetically generated peptide
  VARIANT (1)..(16): Xaa = Any Amino Acid
CCEFCCNXXPACXTGC

SEQ ID NO: 5620 - protein, 17 aa, Artificial Sequence
  Synthetically generated peptide
  VARIANT (1)..(17): Xaa = Any Amino Acid
CCEFCCNXXPACXXTGC

SEQ ID NO: 5621 - protein, 17 aa, Artificial Sequence
  Synthetically generated peptide
  VARIANT (1)..(17): Xaa = Any Amino Acid
CCEFCCNXXPACXTXGC

SEQ ID NO: 5622 - protein, 17 aa, Artificial Sequence
  Synthetically generated peptide
  VARIANT (1)..(17): Xaa = Any Amino Acid
CCEFCCNXXPACXTGXC

SEQ ID NO: 5623 - protein, 16 aa, Artificial Sequence
  Synthetically generated peptide
  VARIANT (1)..(16): Xaa = Any Amino Acid
CCEFCCNXXPACTXGC

SEQ ID NO: 5624 - protein, 17 aa, Artificial Sequence
  Synthetically generated peptide
  VARIANT (1)..(17): Xaa = Any Amino Acid
CCEFCCNXXPACTXXGC

SEQ ID NO: 5625 - protein, 17 aa, Artificial Sequence
  Synthetically generated peptide
  VARIANT (1)..(17): Xaa = Any Amino Acid
CCEFCCNXXPACTXGXC

SEQ ID NO: 5626 - protein, 16 aa, Artificial Sequence
  Synthetically generated peptide
  VARIANT (1)..(16): Xaa = Any Amino Acid
CCEFCCNXXPACTGXC

SEQ ID NO: 5627 - protein, 17 aa, Artificial Sequence
  Synthetically generated peptide
  VARIANT (1)..(17): Xaa = Any Amino Acid
CCEFCCNXXPACTGXXC

SEQ ID NO: 5628 - protein, 15 aa, Artificial Sequence
  Synthetically generated peptide
  VARIANT (1)..(15): Xaa = Any Amino Acid
CCEFCCNXPXACTGC

SEQ ID NO: 5629 - protein, 16 aa, Artificial Sequence
  Synthetically generated peptide
  VARIANT (1)..(16): Xaa = Any Amino Acid
CCEFCCNXPXXACTGC

SEQ ID NO: 5630 - protein, 17 aa, Artificial Sequence
  Synthetically generated peptide
  VARIANT (1)..(17): Xaa = Any Amino Acid
CCEFCCNXPXXXACTGC

SEQ ID NO: 5631 - protein, 17 aa, Artificial Sequence
  Synthetically generated peptide
  VARIANT (1)..(17): Xaa = Any Amino Acid
CCEFCCNXPXXAXCTGC

SEQ ID NO: 5632 - protein, 17 aa, Artificial Sequence
  Synthetically generated peptide
  VARIANT (1)..(17): Xaa = Any Amino Acid
CCEFCCNXPXXACXTGC

SEQ ID NO: 5633 - protein, 17 aa, Artificial Sequence
  Synthetically generated peptide
  VARIANT (1)..(17): Xaa = Any Amino Acid
CCEFCCNXPXXACTXGC

SEQ ID NO: 5634 - protein, 17 aa, Artificial Sequence
  Synthetically generated peptide
  VARIANT (1)..(17): Xaa = Any Amino Acid
CCEFCCNXPXXACTGXC

SEQ ID NO: 5635 - protein, 16 aa, Artificial Sequence
  Synthetically generated peptide
  VARIANT (1)..(16): Xaa = Any Amino Acid
CCEFCCNXPXAXCTGC

SEQ ID NO: 5636 - protein, 17 aa, Artificial Sequence
  Synthetically generated peptide
  VARIANT (1)..(17): Xaa = Any Amino Acid
CCEFCCNXPXAXXCTGC

SEQ ID NO: 5637 - protein, 17 aa, Artificial Sequence
  Synthetically generated peptide
  VARIANT (1)..(17): Xaa = Any Amino Acid
CCEFCCNXPXAXCXTGC

SEQ ID NO: 5638 - protein, 17 aa, Artificial Sequence
  Synthetically generated peptide
  VARIANT (1)..(17): Xaa = Any Amino Acid
CCEFCCNXPXAXCTXGC

SEQ ID NO: 5639 - protein, 17 aa, Artificial Sequence
  Synthetically generated peptide
  VARIANT (1)..(17): Xaa = Any Amino Acid
CCEFCCNXPXAXCTGXC

SEQ ID NO: 5640 - protein, 16 aa, Artificial Sequence
  Synthetically generated peptide
  VARIANT (1)..(16): Xaa = Any Amino Acid
CCEFCCNXPXACXTGC

SEQ ID NO: 5641 - protein, 17 aa, Artificial Sequence
  Synthetically generated peptide
  VARIANT (1)..(17): Xaa = Any Amino Acid
CCEFCCNXPXACXXTGC

SEQ ID NO: 5642 - protein, 17 aa, Artificial Sequence
  Synthetically generated peptide
  VARIANT (1)..(17): Xaa = Any Amino Acid
CCEFCCNXPXACXTXGC

SEQ ID NO: 5643 - protein, 17 aa, Artificial Sequence
  Synthetically generated peptide
  VARIANT (1)..(17): Xaa = Any Amino Acid
CCEFCCNXPXACXTGXC

SEQ ID NO: 5644 - protein, 16 aa, Artificial Sequence
  Synthetically generated peptide
  VARIANT (1)..(16): Xaa = Any Amino Acid
CCEFCCNXPXACTXGC

SEQ ID NO: 5645 - protein, 17 aa, Artificial Sequence
  Synthetically generated peptide
  VARIANT (1)..(17): Xaa = Any Amino Acid
CCEFCCNXPXACTXXGC

SEQ ID NO: 5646 - protein, 17 aa, Artificial Sequence
  Synthetically generated peptide
  VARIANT (1)..(17): Xaa = Any Amino Acid
CCEFCCNXPXACTXGXC

SEQ ID NO: 5647 - protein, 16 aa, Artificial Sequence
  Synthetically generated peptide
  VARIANT (1)..(16): Xaa = Any Amino Acid
CCEFCCNXPXACTGXC

SEQ ID NO: 5648 - protein, 17 aa, Artificial Sequence
  Synthetically generated peptide
  VARIANT (1)..(17): Xaa = Any Amino Acid
CCEFCCNXPXACTGXXC

SEQ ID NO: 5649 - protein, 15 aa, Artificial Sequence
  Synthetically generated peptide
  VARIANT (1)..(15): Xaa = Any Amino Acid
CCEFCCNXPAXCTGC

SEQ ID NO: 5650 - protein, 16 aa, Artificial Sequence
  Synthetically generated peptide
  VARIANT (1)..(16): Xaa = Any Amino Acid
CCEFCCNXPAXXCTGC

SEQ ID NO: 5651 - protein, 17 aa, Artificial Sequence
  Synthetically generated peptide
  VARIANT (1)..(17): Xaa = Any Amino Acid
CCEFCCNXPAXXXCTGC

SEQ ID NO: 5652 - protein, 17 aa, Artificial Sequence
  Synthetically generated peptide
  VARIANT (1)..(17): Xaa = Any Amino Acid
CCEFCCNXPAXXCXTGC

SEQ ID NO: 5653 - protein, 17 aa, Artificial Sequence
  Synthetically generated peptide
  VARIANT (1)..(17): Xaa = Any Amino Acid
CCEFCCNXPAXXCTXGC

SEQ ID NO: 5654 - protein, 17 aa, Artificial Sequence
  Synthetically generated peptide
  VARIANT (1)..(17): Xaa = Any Amino Acid
CCEFCCNXPAXXCTGXC

SEQ ID NO: 5655 - protein, 16 aa, Artificial Sequence
  Synthetically generated peptide
  VARIANT (1)..(16): Xaa = Any Amino Acid
CCEFCCNXPAXCXTGC

SEQ ID NO: 5656 - protein, 17 aa, Artificial Sequence
  Synthetically generated peptide
  VARIANT (1)..(17): Xaa = Any Amino Acid
CCEFCCNXPAXCXXTGC

SEQ ID NO: 5657 - protein, 17 aa, Artificial Sequence
  Synthetically generated peptide
  VARIANT (1)..(17): Xaa = Any Amino Acid
CCEFCCNXPAXCXTXGC

SEQ ID NO: 5658 - protein, 17 aa, Artificial Sequence
  Synthetically generated peptide
  VARIANT (1)..(17): Xaa = Any Amino Acid
CCEFCCNXPAXCXTGXC

SEQ ID NO: 5659 - protein, 16 aa, Artificial Sequence
  Synthetically generated peptide
  VARIANT (1)..(16): Xaa = Any Amino Acid
CCEFCCNXPAXCTXGC

SEQ ID NO: 5660 - protein, 17 aa, Artificial Sequence
  Synthetically generated peptide
  VARIANT (1)..(17): Xaa = Any Amino Acid
CCEFCCNXPAXCTXXGC

SEQ ID NO: 5661 - protein, 17 aa, Artificial Sequence
  Synthetically generated peptide
  VARIANT (1)..(17): Xaa = Any Amino Acid
CCEFCCNXPAXCTXGXC

SEQ ID NO: 5662 - protein, 16 aa, Artificial Sequence
  Synthetically generated peptide
  VARIANT (1)..(16): Xaa = Any Amino Acid
CCEFCCNXPAXCTGXC

SEQ ID NO: 5663 - protein, 17 aa, Artificial Sequence
  Synthetically generated peptide
  VARIANT (1)..(17): Xaa = Any Amino Acid
CCEFCCNXPAXCTGXXC

SEQ ID NO: 5664 - protein, 15 aa, Artificial Sequence
  Synthetically generated peptide
  VARIANT (1)..(15): Xaa = Any Amino Acid
CCEFCCNXPACXTGC

SEQ ID NO: 5665 - protein, 16 aa, Artificial Sequence
  Synthetically generated peptide
  VARIANT (1)..(16): Xaa = Any Amino Acid
CCEFCCNXPACXXTGC

SEQ ID NO: 5666 - protein, 17 aa, Artificial Sequence
  Synthetically generated peptide
  VARIANT (1)..(17): Xaa = Any Amino Acid
CCEFCCNXPACXXXTGC

SEQ ID NO: 5667 - protein, 17 aa, Artificial Sequence
  Synthetically generated peptide
  VARIANT (1)..(17): Xaa = Any Amino Acid
CCEFCCNXPACXXTXGC

SEQ ID NO: 5668 - protein, 17 aa, Artificial Sequence
  Synthetically generated peptide
  VARIANT (1)..(17): Xaa = Any Amino Acid
CCEFCCNXPACXXTGXC

SEQ ID NO: 5669 - protein, 16 aa, Artificial Sequence
  Synthetically generated peptide
  VARIANT (1)..(16): Xaa = Any Amino Acid
CCEFCCNXPACXTXGC

SEQ ID NO: 5670 - protein, 17 aa, Artificial Sequence
  Synthetically generated peptide
  VARIANT (1)..(17): Xaa = Any Amino Acid
CCEFCCNXPACXTXXGC

SEQ ID NO: 5671 - protein, 17 aa, Artificial Sequence
  Synthetically generated peptide
  VARIANT (1)..(17): Xaa = Any Amino Acid
CCEFCCNXPACXTXGXC

SEQ ID NO: 5672 - protein, 16 aa, Artificial Sequence
  Synthetically generated peptide
  VARIANT (1)..(16): Xaa = Any Amino Acid
CCEFCCNXPACXTGXC

SEQ ID NO: 5673 - protein, 17 aa, Artificial Sequence
  Synthetically generated peptide
  VARIANT (1)..(17): Xaa = Any Amino Acid
CCEFCCNXPACXTGXXC

SEQ ID NO: 5674 - protein, 15 aa, Artificial Sequence
  Synthetically generated peptide
  VARIANT (1)..(15): Xaa = Any Amino Acid
CCEFCCNXPACTXGC

SEQ ID NO: 5675 - protein, 16 aa, Artificial Sequence
  Synthetically generated peptide
  VARIANT (1)..(16): Xaa = Any Amino Acid
CCEFCCNXPACTXXGC

SEQ ID NO: 5676 - protein, 17 aa, Artificial Sequence
  Synthetically generated peptide
  VARIANT (1)..(17): Xaa = Any Amino Acid
CCEFCCNXPACTXXXGC

SEQ ID NO: 5677 - protein, 17 aa, Artificial Sequence
  Synthetically generated peptide
  VARIANT (1)..(17): Xaa = Any Amino Acid
CCEFCCNXPACTXXGXC

SEQ ID NO: 5678 - protein, 16 aa, Artificial Sequence
  Synthetically generated peptide
  VARIANT (1)..(16): Xaa = Any Amino Acid
CCEFCCNXPACTXGXC

SEQ ID NO: 5679 - protein, 17 aa, Artificial Sequence
  Synthetically generated peptide
  VARIANT (1)..(17): Xaa = Any Amino Acid
CCEFCCNXPACTXGXXC

SEQ ID NO: 5680 - protein, 15 aa, Artificial Sequence
  Synthetically generated peptide
  VARIANT (1)..(15): Xaa = Any Amino Acid
CCEFCCNXPACTGXC

SEQ ID NO: 5681 - protein, 16 aa, Artificial Sequence
  Synthetically generated peptide
  VARIANT (1)..(16): Xaa = Any Amino Acid
CCEFCCNXPACTGXXC

SEQ ID NO: 5682 - protein, 17 aa, Artificial Sequence
  Synthetically generated peptide
  VARIANT (1)..(17): Xaa = Any Amino Acid
CCEFCCNXPACTGXXXC

SEQ ID NO: 5683 - protein, 14 aa, Artificial Sequence
  Synthetically generated peptide
  VARIANT (1)..(14): Xaa = Any Amino Acid
CCEFCCNPXACTGC

SEQ ID NO: 5684 - protein, 15 aa, Artificial Sequence
  Synthetically generated peptide
  VARIANT (1)..(15): Xaa = Any Amino Acid
CCEFCCNPXXACTGC

SEQ ID NO: 5685 - protein, 16 aa, Artificial Sequence
  Synthetically generated peptide
  VARIANT (1)..(16): Xaa = Any Amino Acid
CCEFCCNPXXXACTGC

SEQ ID NO: 5686 - protein, 17 aa, Artificial Sequence
  Synthetically generated peptide
  VARIANT (1)..(17): Xaa = Any Amino Acid
CCEFCCNPXXXXACTGC

SEQ ID NO: 5687 - protein, 17 aa, Artificial Sequence
  Synthetically generated peptide
  VARIANT (1)..(17): Xaa = Any Amino Acid
CCEFCCNPXXXAXCTGC

SEQ ID NO: 5688 - protein, 17 aa, Artificial Sequence
  Synthetically generated peptide
  VARIANT (1)..(17): Xaa = Any Amino Acid
CCEFCCNPXXXACXTGC

SEQ ID NO: 5689 - protein, 17 aa, Artificial Sequence
  Synthetically generated peptide
  VARIANT (1)..(17): Xaa = Any Amino Acid
CCEFCCNPXXXACTXGC

SEQ ID NO: 5690 - protein, 17 aa, Artificial Sequence
  Synthetically generated peptide
  VARIANT (1)..(17): Xaa = Any Amino Acid
CCEFCCNPXXXACTGXC

SEQ ID NO: 5691 - protein, 16 aa, Artificial Sequence
  Synthetically generated peptide
  VARIANT (1)..(16): Xaa = Any Amino Acid
CCEFCCNPXXAXCTGC

SEQ ID NO: 5692 - protein, 17 aa, Artificial Sequence
  Synthetically generated peptide
  VARIANT (1)..(17): Xaa = Any Amino Acid
CCEFCCNPXXAXXCTGC

SEQ ID NO: 5693 - protein, 17 aa, Artificial Sequence
  Synthetically generated peptide
  VARIANT (1)..(17): Xaa = Any Amino Acid
CCEFCCNPXXAXCXTGC

SEQ ID NO: 5694 - protein, 17 aa, Artificial Sequence
  Synthetically generated peptide
  VARIANT (1)..(17): Xaa = Any Amino Acid
CCEFCCNPXXAXCTXGC

SEQ ID NO: 5695 - protein, 17 aa, Artificial Sequence
  Synthetically generated peptide
  VARIANT (1)..(17): Xaa = Any Amino Acid
CCEFCCNPXXAXCTGXC

SEQ ID NO: 5696 - protein, 16 aa, Artificial Sequence
  Synthetically generated peptide
  VARIANT (1)..(16): Xaa = Any Amino Acid
CCEFCCNPXXACXTGC

SEQ ID NO: 5697 - protein, 17 aa, Artificial Sequence
  Synthetically generated peptide
  VARIANT (1)..(17): Xaa = Any Amino Acid
CCEFCCNPXXACXXTGC

SEQ ID NO: 5698 - protein, 17 aa, Artificial Sequence
  Synthetically generated peptide
  VARIANT (1)..(17): Xaa = Any Amino Acid
CCEFCCNPXXACXTXGC

SEQ ID NO: 5699 - protein, 17 aa, Artificial Sequence
  Synthetically generated peptide
  VARIANT (1)..(17): Xaa = Any Amino Acid
CCEFCCNPXXACXTGXC

SEQ ID NO: 5700 - protein, 16 aa, Artificial Sequence
  Synthetically generated peptide
  VARIANT (1)..(16): Xaa = Any Amino Acid
CCEFCCNPXXACTXGC

SEQ ID NO: 5701 - protein, 17 aa, Artificial Sequence
  Synthetically generated peptide
  VARIANT (1)..(17): Xaa = Any Amino Acid
CCEFCCNPXXACTXXGC

SEQ ID NO: 5702 - protein, 17 aa, Artificial Sequence
  Synthetically generated peptide
  VARIANT (1)..(17): Xaa = Any Amino Acid
CCEFCCNPXXACTXGXC

SEQ ID NO: 5703 - protein, 16 aa, Artificial Sequence
  Synthetically generated peptide
  VARIANT (1)..(16): Xaa = Any Amino Acid
CCEFCCNPXXACTGXC

SEQ ID NO: 5704 - protein, 17 aa, Artificial Sequence
  Synthetically generated peptide
  VARIANT (1)..(17): Xaa = Any Amino Acid
CCEFCCNPXXACTGXXC

SEQ ID NO: 5705 - protein, 15 aa, Artificial Sequence
  Synthetically generated peptide
  VARIANT (1)..(15): Xaa = Any Amino Acid
CCEFCCNPXAXCTGC

SEQ ID NO: 5706 - protein, 16 aa, Artificial Sequence
  Synthetically generated peptide
  VARIANT (1)..(16): Xaa = Any Amino Acid
CCEFCCNPXAXXCTGC

SEQ ID NO: 5707 - protein, 17 aa, Artificial Sequence
  Synthetically generated peptide
  VARIANT (1)..(17): Xaa = Any Amino Acid
CCEFCCNPXAXXXCTGC

SEQ ID NO: 5708 - protein, 17 aa, Artificial Sequence
  Synthetically generated peptide
  VARIANT (1)..(17): Xaa = Any Amino Acid
CCEFCCNPXAXXCXTGC

SEQ ID NO: 5709 - protein, 17 aa, Artificial Sequence
  Synthetically generated peptide
  VARIANT (1)..(17): Xaa = Any Amino Acid
CCEFCCNPXAXXCTXGC

SEQ ID NO: 5710 - protein, 17 aa, Artificial Sequence
  Synthetically generated peptide
  VARIANT (1)..(17): Xaa = Any Amino Acid
CCEFCCNPXAXXCTGXC

SEQ ID NO: 5711 - protein, 16 aa, Artificial Sequence
  Synthetically generated peptide
  VARIANT (1)..(16): Xaa = Any Amino Acid
CCEFCCNPXAXCXTGC

SEQ ID NO: 5712 - protein, 17 aa, Artificial Sequence
  Synthetically generated peptide
  VARIANT (1)..(17): Xaa = Any Amino Acid
CCEFCCNPXAXCXXTGC

SEQ ID NO: 5713 - protein, 17 aa, Artificial Sequence
  Synthetically generated peptide
  VARIANT (1)..(17): Xaa = Any Amino Acid
CCEFCCNPXAXCXTXGC

SEQ ID NO: 5714 - protein, 17 aa, Artificial Sequence
  Synthetically generated peptide
  VARIANT (1)..(17): Xaa = Any Amino Acid
CCEFCCNPXAXCXTGXC

SEQ ID NO: 5715 - protein, 16 aa, Artificial Sequence
  Synthetically generated peptide
  VARIANT (1)..(16): Xaa = Any Amino Acid
CCEFCCNPXAXCTXGC

SEQ ID NO: 5716 - protein, 17 aa, Artificial Sequence
  Synthetically generated peptide
  VARIANT (1)..(17): Xaa = Any Amino Acid
CCEFCCNPXAXCTXXGC

SEQ ID NO: 5717 - protein, 17 aa, Artificial Sequence
  Synthetically generated peptide
  VARIANT (1)..(17): Xaa = Any Amino Acid
CCEFCCNPXAXCTXGXC

SEQ ID NO: 5718 - protein, 16 aa, Artificial Sequence
  Synthetically generated peptide
  VARIANT (1)..(16): Xaa = Any Amino Acid
CCEFCCNPXAXCTGXC

SEQ ID NO: 5719 - protein, 17 aa, Artificial Sequence
  Synthetically generated peptide
  VARIANT (1)..(17): Xaa = Any Amino Acid
CCEFCCNPXAXCTGXXC

SEQ ID NO: 5720 - protein, 15 aa, Artificial Sequence
  Synthetically generated peptide
  VARIANT (1)..(15): Xaa = Any Amino Acid
CCEFCCNPXACXTGC

SEQ ID NO: 5721 - protein, 16 aa, Artificial Sequence
  Synthetically generated peptide
  VARIANT (1)..(16): Xaa = Any Amino Acid
CCEFCCNPXACXXTGC

SEQ ID NO: 5722 - protein, 17 aa, Artificial Sequence
  Synthetically generated peptide
  VARIANT (1)..(17): Xaa = Any Amino Acid
CCEFCCNPXACXXXTGC

SEQ ID NO: 5723 - protein, 17 aa, Artificial Sequence
  Synthetically generated peptide
  VARIANT (1)..(17): Xaa = Any Amino Acid
CCEFCCNPXACXXTXGC

SEQ ID NO: 5724 - protein, 17 aa, Artificial Sequence
  Synthetically generated peptide
  VARIANT (1)..(17): Xaa = Any Amino Acid
CCEFCCNPXACXXTGXC

SEQ ID NO: 5725 - protein, 16 aa, Artificial Sequence
  Synthetically generated peptide
  VARIANT (1)..(16): Xaa = Any Amino Acid
CCEFCCNPXACXTXGC

SEQ ID NO: 5726 - protein, 17 aa, Artificial Sequence
  Synthetically generated peptide
  VARIANT (1)..(17): Xaa = Any Amino Acid
CCEFCCNPXACXTXXGC

SEQ ID NO: 5727 - protein, 17 aa, Artificial Sequence
  Synthetically generated peptide
  VARIANT (1)..(17): Xaa = Any Amino Acid
CCEFCCNPXACXTXGXC

SEQ ID NO: 5728 - protein, 16 aa, Artificial Sequence
  Synthetically generated peptide
  VARIANT (1)..(16): Xaa = Any Amino Acid
CCEFCCNPXACXTGXC

SEQ ID NO: 5729 - protein, 17 aa, Artificial Sequence
  Synthetically generated peptide
  VARIANT (1)..(17): Xaa = Any Amino Acid
CCEFCCNPXACXTGXXC

SEQ ID NO: 5730 - protein, 15 aa, Artificial Sequence
  Synthetically generated peptide
  VARIANT (1)..(15): Xaa = Any Amino Acid
CCEFCCNPXACTXGC

SEQ ID NO: 5731 - protein, 16 aa, Artificial Sequence
  Synthetically generated peptide
  VARIANT (1)..(16): Xaa = Any Amino Acid
CCEFCCNPXACTXXGC

SEQ ID NO: 5732 - protein, 17 aa, Artificial Sequence
  Synthetically generated peptide
  VARIANT (1)..(17): Xaa = Any Amino Acid
CCEFCCNPXACTXXXGC

SEQ ID NO: 5733 - protein, 17 aa, Artificial Sequence
  Synthetically generated peptide
  VARIANT (1)..(17): Xaa = Any Amino Acid
CCEFCCNPXACTXXGXC

SEQ ID NO: 5734 - protein, 16 aa, Artificial Sequence
  Synthetically generated peptide
  VARIANT (1)..(16): Xaa = Any Amino Acid
CCEFCCNPXACTXGXC

SEQ ID NO: 5735 - protein, 17 aa, Artificial Sequence
  Synthetically generated peptide
  VARIANT (1)..(17): Xaa = Any Amino Acid
CCEFCCNPXACTXGXXC

SEQ ID NO: 5736 - protein, 15 aa, Artificial Sequence
  Synthetically generated peptide
  VARIANT (1)..(15): Xaa = Any Amino Acid
CCEFCCNPXACTGXC

SEQ ID NO: 5737 - protein, 16 aa, Artificial Sequence
  Synthetically generated peptide
  VARIANT (1)..(16): Xaa = Any Amino Acid
CCEFCCNPXACTGXXC

SEQ ID NO: 5738 - protein, 17 aa, Artificial Sequence
  Synthetically generated peptide
  VARIANT (1)..(17): Xaa = Any Amino Acid
CCEFCCNPXACTGXXXC

SEQ ID NO: 5739 - protein, 14 aa, Artificial Sequence
  Synthetically generated peptide
  VARIANT (1)..(14): Xaa = Any Amino Acid
CCEFCCNPAXCTGC

SEQ ID NO: 5740 - protein, 15 aa, Artificial Sequence
  Synthetically generated peptide
  VARIANT (1)..(15): Xaa = Any Amino Acid
CCEFCCNPAXXCTGC

SEQ ID NO: 5741 - protein, 16 aa, Artificial Sequence
  Synthetically generated peptide
  VARIANT (1)..(16): Xaa = Any Amino Acid
CCEFCCNPAXXXCTGC

SEQ ID NO: 5742 - protein, 17 aa, Artificial Sequence
  Synthetically generated peptide
  VARIANT (1)..(17): Xaa = Any Amino Acid
CCEFCCNPAXXXXCTGC

SEQ ID NO: 5743 - protein, 17 aa, Artificial Sequence
  Synthetically generated peptide
  VARIANT (1)..(17): Xaa = Any Amino Acid
CCEFCCNPAXXXCXTGC

SEQ ID NO: 5744 - protein, 17 aa, Artificial Sequence
  Synthetically generated peptide
  VARIANT (1)..(17): Xaa = Any Amino Acid
CCEFCCNPAXXXCTXGC

SEQ ID NO: 5745 - protein, 17 aa, Artificial Sequence
  Synthetically generated peptide
  VARIANT (1)..(17): Xaa = Any Amino Acid
CCEFCCNPAXXXCTGXC

SEQ ID NO: 5746 - protein, 16 aa, Artificial Sequence
  Synthetically generated peptide
  VARIANT (1)..(16): Xaa = Any Amino Acid
CCEFCCNPAXXCXTGC

SEQ ID NO: 5747 - protein, 17 aa, Artificial Sequence
  Synthetically generated peptide
  VARIANT (1)..(17): Xaa = Any Amino Acid
CCEFCCNPAXXCXXTGC

SEQ ID NO: 5748 - protein, 17 aa, Artificial Sequence
  Synthetically generated peptide
  VARIANT (1)..(17): Xaa = Any Amino Acid
CCEFCCNPAXXCXTXGC

SEQ ID NO: 5749 - protein, 17 aa, Artificial Sequence
  Synthetically generated peptide
  VARIANT (1)..(17): Xaa = Any Amino Acid
CCEFCCNPAXXCXTGXC

SEQ ID NO: 5750 - protein, 16 aa, Artificial Sequence
  Synthetically generated peptide
  VARIANT (1)..(16): Xaa = Any Amino Acid
CCEFCCNPAXXCTXGC

SEQ ID NO: 5751 - protein, 17 aa, Artificial Sequence
  Synthetically generated peptide
  VARIANT (1)..(17): Xaa = Any Amino Acid
CCEFCCNPAXXCTXXGC

SEQ ID NO: 5752 - protein, 17 aa, Artificial Sequence
  Synthetically generated peptide
  VARIANT (1)..(17): Xaa = Any Amino Acid
CCEFCCNPAXXCTXGXC

SEQ ID NO: 5753 - protein, 16 aa, Artificial Sequence
  Synthetically generated peptide
  VARIANT (1)..(16): Xaa = Any Amino Acid
CCEFCCNPAXXCTGXC

SEQ ID NO: 5754 - protein, 17 aa, Artificial Sequence
  Synthetically generated peptide
  VARIANT (1)..(17): Xaa = Any Amino Acid
CCEFCCNPAXXCTGXXC

SEQ ID NO: 5755 - protein, 15 aa, Artificial Sequence
  Synthetically generated peptide
  VARIANT (1)..(15): Xaa = Any Amino Acid
CCEFCCNPAXCXTGC

SEQ ID NO: 5756 - protein, 16 aa, Artificial Sequence
  Synthetically generated peptide
  VARIANT (1)..(16): Xaa = Any Amino Acid
CCEFCCNPAXCXXTGC

SEQ ID NO: 5757 - protein, 17 aa, Artificial Sequence
  Synthetically generated peptide
  VARIANT (1)..(17): Xaa = Any Amino Acid
CCEFCCNPAXCXXXTGC

SEQ ID NO: 5758 - protein, 17 aa, Artificial Sequence
  Synthetically generated peptide
  VARIANT (1)..(17): Xaa = Any Amino Acid
CCEFCCNPAXCXXTXGC

SEQ ID NO: 5759 - protein, 17 aa, Artificial Sequence
  Synthetically generated peptide
  VARIANT (1)..(17): Xaa = Any Amino Acid
CCEFCCNPAXCXXTGXC

SEQ ID NO: 5760 - protein, 16 aa, Artificial Sequence
  Synthetically generated peptide
  VARIANT (1)..(16): Xaa = Any Amino Acid
CCEFCCNPAXCXTXGC

SEQ ID NO: 5761 - protein, 17 aa, Artificial Sequence
  Synthetically generated peptide
  VARIANT (1)..(17): Xaa = Any Amino Acid
CCEFCCNPAXCXTXXGC

SEQ ID NO: 5762 - protein, 17 aa, Artificial Sequence
  Synthetically generated peptide
  VARIANT (1)..(17): Xaa = Any Amino Acid
CCEFCCNPAXCXTXGXC

SEQ ID NO: 5763 - protein, 16 aa, Artificial Sequence
  Synthetically generated peptide
  VARIANT (1)..(16): Xaa = Any Amino Acid
CCEFCCNPAXCXTGXC

SEQ ID NO: 5764 - protein, 17 aa, Artificial Sequence
  Synthetically generated peptide
  VARIANT (1)..(17): Xaa = Any Amino Acid
CCEFCCNPAXCXTGXXC

SEQ ID NO: 5765 - protein, 15 aa, Artificial Sequence
  Synthetically generated peptide
  VARIANT (1)..(15): Xaa = Any Amino Acid
CCEFCCNPAXCTXGC

SEQ ID NO: 5766 - protein, 16 aa, Artificial Sequence
  Synthetically generated peptide
  VARIANT (1)..(16): Xaa = Any Amino Acid
CCEFCCNPAXCTXXGC

SEQ ID NO: 5767 - protein, 17 aa, Artificial Sequence
  Synthetically generated peptide
  VARIANT (1)..(17): Xaa = Any Amino Acid
CCEFCCNPAXCTXXXGC

SEQ ID NO: 5768 - protein, 17 aa, Artificial Sequence
  Synthetically generated peptide
  VARIANT (1)..(17): Xaa = Any Amino Acid
CCEFCCNPAXCTXXGXC

SEQ ID NO: 5769 - protein, 16 aa, Artificial Sequence
  Synthetically generated peptide
  VARIANT (1)..(16): Xaa = Any Amino Acid
CCEFCCNPAXCTXGXC

SEQ ID NO: 5770 - protein, 17 aa, Artificial Sequence
  Synthetically generated peptide
  VARIANT (1)..(17): Xaa = Any Amino Acid
CCEFCCNPAXCTXGXXC

SEQ ID NO: 5771 - protein, 15 aa, Artificial Sequence
  Synthetically generated peptide
  VARIANT (1)..(15): Xaa = Any Amino Acid
CCEFCCNPAXCTGXC

SEQ ID NO: 5772 - protein, 16 aa, Artificial Sequence
  Synthetically generated peptide
  VARIANT (1)..(16): Xaa = Any Amino Acid
CCEFCCNPAXCTGXXC

SEQ ID NO: 5773 - protein, 17 aa, Artificial Sequence
  Synthetically generated peptide
  VARIANT (1)..(17): Xaa = Any Amino Acid
CCEFCCNPAXCTGXXXC

SEQ ID NO: 5774 - protein, 14 aa, Artificial Sequence
  Synthetically generated peptide
  VARIANT (1)..(14): Xaa = Any Amino Acid
CCEFCCNPACXTGC

SEQ ID NO: 5775 - protein, 15 aa, Artificial Sequence
  Synthetically generated peptide
  VARIANT (1)..(15): Xaa = Any Amino Acid
CCEFCCNPACXXTGC

SEQ ID NO: 5776 - protein, 16 aa, Artificial Sequence
  Synthetically generated peptide
  VARIANT (1)..(16): Xaa = Any Amino Acid
CCEFCCNPACXXXTGC

SEQ ID NO: 5777 - protein, 17 aa, Artificial Sequence
  Synthetically generated peptide
  VARIANT (1)..(17): Xaa = Any Amino Acid
CCEFCCNPACXXXXTGC

SEQ ID NO: 5778 - protein, 17 aa, Artificial Sequence
  Synthetically generated peptide
  VARIANT (1)..(17): Xaa = Any Amino Acid
CCEFCCNPACXXXTXGC

SEQ ID NO: 5779 - protein, 17 aa, Artificial Sequence
  Synthetically generated peptide
  VARIANT (1)..(17): Xaa = Any Amino Acid
CCEFCCNPACXXXTGXC

SEQ ID NO: 5780 - protein, 16 aa, Artificial Sequence
  Synthetically generated peptide
  VARIANT (1)..(16): Xaa = Any Amino Acid
CCEFCCNPACXXTXGC

SEQ ID NO: 5781 - protein, 17 aa, Artificial Sequence
  Synthetically generated peptide
  VARIANT (1)..(17): Xaa = Any Amino Acid
CCEFCCNPACXXTXXGC

SEQ ID NO: 5782 - protein, 17 aa, Artificial Sequence
  Synthetically generated peptide
  VARIANT (1)..(17): Xaa = Any Amino Acid
CCEFCCNPACXXTXGXC

SEQ ID NO: 5783 - protein, 16 aa, Artificial Sequence
  Synthetically generated peptide
  VARIANT (1)..(16): Xaa = Any Amino Acid
CCEFCCNPACXXTGXC

SEQ ID NO: 5784 - protein, 17 aa, Artificial Sequence
  Synthetically generated peptide
  VARIANT (1)..(17): Xaa = Any Amino Acid
CCEFCCNPACXXTGXXC

SEQ ID NO: 5785 - protein, 15 aa, Artificial Sequence
  Synthetically generated peptide
  VARIANT (1)..(15): Xaa = Any Amino Acid
CCEFCCNPACXTXGC

SEQ ID NO: 5786 - protein, 16 aa, Artificial Sequence
  Synthetically generated peptide
  VARIANT (1)..(16): Xaa = Any Amino Acid
CCEFCCNPACXTXXGC

SEQ ID NO: 5787 - protein, 17 aa, Artificial Sequence
  Synthetically generated peptide
  VARIANT (1)..(17): Xaa = Any Amino Acid
CCEFCCNPACXTXXXGC

SEQ ID NO: 5788 - protein, 17 aa, Artificial Sequence
  Synthetically generated peptide
  VARIANT (1)..(17): Xaa = Any Amino Acid
CCEFCCNPACXTXXGXC

SEQ ID NO: 5789 - protein, 16 aa, Artificial Sequence
  Synthetically generated peptide
  VARIANT (1)..(16): Xaa = Any Amino Acid
CCEFCCNPACXTXGXC

SEQ ID NO: 5790 - protein, 17 aa, Artificial Sequence
  Synthetically generated peptide
  VARIANT (1)..(17): Xaa = Any Amino Acid
CCEFCCNPACXTXGXXC

SEQ ID NO: 5791 - protein, 15 aa, Artificial Sequence
  Synthetically generated peptide
  VARIANT (1)..(15): Xaa = Any Amino Acid
CCEFCCNPACXTGXC

SEQ ID NO: 5792 - protein, 16 aa, Artificial Sequence
  Synthetically generated peptide
  VARIANT (1)..(16): Xaa = Any Amino Acid
CCEFCCNPACXTGXXC

SEQ ID NO: 5793 - protein, 17 aa, Artificial Sequence
  Synthetically generated peptide
  VARIANT (1)..(17): Xaa = Any Amino Acid
CCEFCCNPACXTGXXXC

SEQ ID NO: 5794 - protein, 14 aa, Artificial Sequence
  Synthetically generated peptide
  VARIANT (1)..(14): Xaa = Any Amino Acid
CCEFCCNPACTXGC

SEQ ID NO: 5795 - protein, 15 aa, Artificial Sequence
  Synthetically generated peptide
  VARIANT (1)..(15): Xaa = Any Amino Acid
CCEFCCNPACTXXGC

SEQ ID NO: 5796 - protein, 16 aa, Artificial Sequence
  Synthetically generated peptide
  VARIANT (1)..(16): Xaa = Any Amino Acid
CCEFCCNPACTXXXGC

SEQ ID NO: 5797 - protein, 17 aa, Artificial Sequence
  Synthetically generated peptide
  VARIANT (1)..(17): Xaa = Any Amino Acid
CCEFCCNPACTXXXXGC

SEQ ID NO: 5798 - protein, 17 aa, Artificial Sequence
  Synthetically generated peptide
  VARIANT (1)..(17): Xaa = Any Amino Acid
CCEFCCNPACTXXXGXC

SEQ ID NO: 5799 - protein, 16 aa, Artificial Sequence
  Synthetically generated peptide
  VARIANT (1)..(16): Xaa = Any Amino Acid
CCEFCCNPACTXXGXC

SEQ ID NO: 5800 - protein, 17 aa, Artificial Sequence
  Synthetically generated peptide
  VARIANT (1)..(17): Xaa = Any Amino Acid
CCEFCCNPACTXXGXXC

SEQ ID NO: 5801 - protein, 15 aa, Artificial Sequence
  Synthetically generated peptide
  VARIANT (1)..(15): Xaa = Any Amino Acid
CCEFCCNPACTXGXC

SEQ ID NO: 5802 - protein, 16 aa, Artificial Sequence
  Synthetically generated peptide
  VARIANT (1)..(16): Xaa = Any Amino Acid
CCEFCCNPACTXGXXC

SEQ ID NO: 5803 - protein, 17 aa, Artificial Sequence
  Synthetically generated peptide
  VARIANT (1)..(17): Xaa = Any Amino Acid
CCEFCCNPACTXGXXXC

SEQ ID NO: 5804 - protein, 14 aa, Artificial Sequence
  Synthetically generated peptide
  VARIANT (1)..(14): Xaa = Any Amino Acid
CCEFCCNPACTGXC

SEQ ID NO: 5805 - protein, 15 aa, Artificial Sequence
  Synthetically generated peptide
  VARIANT (1)..(15): Xaa = Any Amino Acid
CCEFCCNPACTGXXC

SEQ ID NO: 5806 - protein, 16 aa, Artificial Sequence
  Synthetically generated peptide
  VARIANT (1)..(16): Xaa = Any Amino Acid
CCEFCCNPACTGXXXC

SEQ ID NO: 5807 - protein, 17 aa, Artificial Sequence
  Synthetically generated peptide
  VARIANT (1)..(17): Xaa = Any Amino Acid
CCEFCCNPACTGXXXXC

SEQ ID NO: 5808 - protein, 13 aa, Artificial Sequence
  Synthetically generated peptide
ACELCANPACTGC

SEQ ID NO: 5809 - protein, 12 aa, Artificial Sequence
  Synthetically generated peptide
ACLCANPACTGC

SEQ ID NO: 5810 - protein, 11 aa, Artificial Sequence
  Synthetically generated peptide
ACCANPACTGC

SEQ ID NO: 5811 - protein, 11 aa, Artificial Sequence
  Synthetically generated peptide
ACLCAPACTGC

SEQ ID NO: 5812 - protein, 11 aa, Artificial Sequence
  Synthetically generated peptide
ACLCANACTGC

SEQ ID NO: 5813 - protein, 11 aa, Artificial Sequence
  Synthetically generated peptide
ACLCANPCTGC

SEQ ID NO: 5814 - protein, 11 aa, Artificial Sequence
  Synthetically generated peptide
ACLCANPACGC

SEQ ID NO: 5815 - protein, 11 aa, Artificial Sequence
  Synthetically generated peptide
ACLCANPACTC

SEQ ID NO: 5816 - protein, 12 aa, Artificial Sequence
  Synthetically generated peptide
ACECANPACTGC

SEQ ID NO: 5817 - protein, 11 aa, Artificial Sequence
  Synthetically generated peptide
ACECAPACTGC

SEQ ID NO: 5818 - protein, 11 aa, Artificial Sequence
  Synthetically generated peptide
ACECANACTGC

SEQ ID NO: 5819 - protein, 11 aa, Artificial Sequence
  Synthetically generated peptide
ACECANPCTGC

SEQ ID NO: 5820 - protein, 11 aa, Artificial Sequence
  Synthetically generated peptide
ACECANPACGC

SEQ ID NO: 5821 - protein, 11 aa, Artificial Sequence
  Synthetically generated peptide
ACECANPACTC

SEQ ID NO: 5822 - protein, 12 aa, Artificial Sequence
  Synthetically generated peptide
ACELCAPACTGC

SEQ ID NO: 5823 - protein, 11 aa, Artificial Sequence
  Synthetically generated peptide
ACELCAACTGC

SEQ ID NO: 5824 - protein, 11 aa, Artificial Sequence
  Synthetically generated peptide
ACELCAPCTGC

SEQ ID NO: 5825 - protein, 11 aa, Artificial Sequence
  Synthetically generated peptide
ACELCAPACGC

SEQ ID NO: 5826 - protein, 11 aa, Artificial Sequence
  Synthetically generated peptide
ACELCAPACTC

SEQ ID NO: 5827 - protein, 12 aa, Artificial Sequence
  Synthetically generated peptide
ACELCANACTGC

SEQ ID NO: 5828 - protein, 11 aa, Artificial Sequence
  Synthetically generated peptide
ACELCANCTGC

SEQ ID NO: 5829 - protein, 11 aa, Artificial Sequence
  Synthetically generated peptide
ACELCANACGC

SEQ ID NO: 5830 - protein, 11 aa, Artificial Sequence
  Synthetically generated peptide
ACELCANACTC

SEQ ID NO: 5831 - protein, 12 aa, Artificial Sequence
  Synthetically generated peptide
ACELCANPCTGC

SEQ ID NO: 5832 - protein, 11 aa, Artificial Sequence
  Synthetically generated peptide
ACELCANPCGC

SEQ ID NO: 5833 - protein, 11 aa, Artificial Sequence
  Synthetically generated peptide
ACELCANPCTC

SEQ ID NO: 5834 - protein, 12 aa, Artificial Sequence
  Synthetically generated peptide
ACELCANPACGC

SEQ ID NO: 5835 - protein, 11 aa, Artificial Sequence
  Synthetically generated peptide
ACELCANPACC

SEQ ID NO: 5836 - protein, 12 aa, Artificial Sequence
  Synthetically generated peptide
ACELCANPACTC

SEQ ID NO: 5837 - protein, 13 aa, Artificial Sequence
  Synthetically generated peptide
CCELACNPACTGA

SEQ ID NO: 5838 - protein, 12 aa, Artificial Sequence
  Synthetically generated peptide
CCLACNPACTGA

SEQ ID NO: 5839 - protein, 11 aa, Artificial Sequence
  Synthetically generated peptide
CCACNPACTGA

SEQ ID NO: 5840 - protein, 11 aa, Artificial Sequence
  Synthetically generated peptide
CCLACPACTGA

SEQ ID NO: 5841 - protein, 11 aa, Artificial Sequence
  Synthetically generated peptide
CCLACNACTGA

SEQ ID NO: 5842 - protein, 11 aa, Artificial Sequence
  Synthetically generated peptide
CCLACNPCTGA

SEQ ID NO: 5843 - protein, 11 aa, Artificial Sequence
  Synthetically generated peptide
CCLACNPACGA

SEQ ID NO: 5844 - protein, 11 aa, Artificial Sequence
  Synthetically generated peptide
CCLACNPACTA

SEQ ID NO: 5845 - protein, 12 aa, Artificial Sequence
  Synthetically generated peptide
CCEACNPACTGA

SEQ ID NO: 5846 - protein, 11 aa, Artificial Sequence
  Synthetically generated peptide
CCEACPACTGA

SEQ ID NO: 5847 - protein, 11 aa, Artificial Sequence
  Synthetically generated peptide
CCEACNACTGA

SEQ ID NO: 5848 - protein, 11 aa, Artificial Sequence
  Synthetically generated peptide
CCEACNPCTGA

SEQ ID NO: 5849 - protein, 11 aa, Artificial Sequence
  Synthetically generated peptide
CCEACNPACGA

SEQ ID NO: 5850 - protein, 11 aa, Artificial Sequence
  Synthetically generated peptide
CCEACNPACTA

SEQ ID NO: 5851 - protein, 12 aa, Artificial Sequence
  Synthetically generated peptide
CCELACPACTGA

SEQ ID NO: 5852 - protein, 11 aa, Artificial Sequence
  Synthetically generated peptide
CCELACACTGA

SEQ ID NO: 5853 - protein, 11 aa, Artificial Sequence
  Synthetically generated peptide
CCELACPCTGA

SEQ ID NO: 5854 - protein, 11 aa, Artificial Sequence
  Synthetically generated peptide
CCELACPACGA

SEQ ID NO: 5855 - protein, 11 aa, Artificial Sequence
  Synthetically generated peptide
CCELACPACTA

SEQ ID NO: 5856 - protein, 12 aa, Artificial Sequence
  Synthetically generated peptide
CCELACNACTGA

SEQ ID NO: 5857 - protein, 11 aa, Artificial Sequence
  Synthetically generated peptide
CCELACNCTGA

SEQ ID NO: 5858 - protein, 11 aa, Artificial Sequence
  Synthetically generated peptide
CCELACNACGA

SEQ ID NO: 5859 - protein, 11 aa, Artificial Sequence
  Synthetically generated peptide
CCELACNACTA

SEQ ID NO: 5860 - protein, 12 aa, Artificial Sequence
  Synthetically generated peptide
CCELACNPCTGA

SEQ ID NO: 5861 - protein, 11 aa, Artificial Sequence
  Synthetically generated peptide
CCELACNPCGA

SEQ ID NO: 5862 - protein, 11 aa, Artificial Sequence
  Synthetically generated peptide
CCELACNPCTA

SEQ ID NO: 5863 - protein, 12 aa, Artificial Sequence
  Synthetically generated peptide
CCELACNPACGA

SEQ ID NO: 5864 - protein, 11 aa, Artificial Sequence
  Synthetically generated peptide
CCELACNPACA

SEQ ID NO: 5865 - protein, 12 aa, Artificial Sequence
  Synthetically generated peptide
CCELACNPACTA

SEQ ID NO: 5866 - protein, 13 aa, Artificial Sequence
  Synthetically generated peptide
ACEYCANPACTGC

SEQ ID NO: 5867 - protein, 12 aa, Artificial Sequence
  Synthetically generated peptide
ACYCANPACTGC

SEQ ID NO: 5868 - protein, 11 aa, Artificial Sequence
  Synthetically generated peptide
ACCANPACTGC

SEQ ID NO: 5869 - protein, 11 aa, Artificial Sequence
  Synthetically generated peptide
ACYCAPACTGC

SEQ ID NO: 5870 - protein, 11 aa, Artificial Sequence
  Synthetically generated peptide
ACYCANACTGC

SEQ ID NO: 5871 - protein, 11 aa, Artificial Sequence
  Synthetically generated peptide
ACYCANPCTGC

SEQ ID NO: 5872 - protein, 11 aa, Artificial Sequence
  Synthetically generated peptide
ACYCANPACGC

SEQ ID NO: 5873 - protein, 11 aa, Artificial Sequence
  Synthetically generated peptide
ACYCANPACTC

SEQ ID NO: 5874 - protein, 12 aa, Artificial Sequence
  Synthetically generated peptide
ACECANPACTGC

SEQ ID NO: 5875 - protein, 11 aa, Artificial Sequence
  Synthetically generated peptide
ACECAPACTGC

SEQ ID NO: 5876 - protein, 11 aa, Artificial Sequence
  Synthetically generated peptide
ACECANACTGC

SEQ ID NO: 5877 - protein, 11 aa, Artificial Sequence
  Synthetically generated peptide
ACECANPCTGC

SEQ ID NO: 5878 - protein, 11 aa, Artificial Sequence
  Synthetically generated peptide
ACECANPACGC

SEQ ID NO: 5879 - protein, 11 aa, Artificial Sequence
  Synthetically generated peptide
ACECANPACTC

SEQ ID NO: 5880 - protein, 12 aa, Artificial Sequence
  Synthetically generated peptide
ACEYCAPACTGC

SEQ ID NO: 5881 - protein, 11 aa, Artificial Sequence
  Synthetically generated peptide
ACEYCAACTGC

SEQ ID NO: 5882 - protein, 11 aa, Artificial Sequence
  Synthetically generated peptide
ACEYCAPCTGC

SEQ ID NO: 5883 - protein, 11 aa, Artificial Sequence
  Synthetically generated peptide
ACEYCAPACGC

SEQ ID NO: 5884 - protein, 11 aa, Artificial Sequence
  Synthetically generated peptide
ACEYCAPACTC

SEQ ID NO: 5885 - protein, 12 aa, Artificial Sequence
  Synthetically generated peptide
ACEYCANACTGC

SEQ ID NO: 5886 - protein, 11 aa, Artificial Sequence
  Synthetically generated peptide
ACEYCANCTGC

SEQ ID NO: 5887 - protein, 11 aa, Artificial Sequence
  Synthetically generated peptide
ACEYCANACGC

SEQ ID NO: 5888 - protein, 11 aa, Artificial Sequence
  Synthetically generated peptide
ACEYCANACTC

SEQ ID NO: 5889 - protein, 12 aa, Artificial Sequence
  Synthetically generated peptide
ACEYCANPCTGC

SEQ ID NO: 5890 - protein, 11 aa, Artificial Sequence
  Synthetically generated peptide
ACEYCANPCGC

SEQ ID NO: 5891 - protein, 11 aa, Artificial Sequence
  Synthetically generated peptide
ACEYCANPCTC

SEQ ID NO: 5892 - protein, 12 aa, Artificial Sequence
  Synthetically generated peptide
ACEYCANPACGC

SEQ ID NO: 5893 - protein, 11 aa, Artificial Sequence
  Synthetically generated peptide
ACEYCANPACC

SEQ ID NO: 5894 - protein, 12 aa, Artificial Sequence
  Synthetically generated peptide
ACEYCANPACTC

SEQ ID NO: 5895 - protein, 13 aa, Artificial Sequence
  Synthetically generated peptide
CCEYACNPACTGA

SEQ ID NO: 5896 - protein, 12 aa, Artificial Sequence
  Synthetically generated peptide
CCYACNPACTGA

SEQ ID NO: 5897 - protein, 11 aa, Artificial Sequence
  Synthetically generated peptide
CCACNPACTGA

SEQ ID NO: 5898 - protein, 11 aa, Artificial Sequence
  Synthetically generated peptide
CCYACPACTGA

SEQ ID NO: 5899 - protein, 11 aa, Artificial Sequence
  Synthetically generated peptide
CCYACNACTGA

SEQ ID NO: 5900 - protein, 11 aa, Artificial Sequence
  Synthetically generated peptide
CCYACNPCTGA

SEQ ID NO: 5901 - protein, 11 aa, Artificial Sequence
  Synthetically generated peptide
CCYACNPACGA

SEQ ID NO: 5902 - protein, 11 aa, Artificial Sequence
  Synthetically generated peptide
CCYACNPACTA

SEQ ID NO: 5903 - protein, 12 aa, Artificial Sequence
  Synthetically generated peptide
CCEACNPACTGA

SEQ ID NO: 5904 - protein, 11 aa, Artificial Sequence
  Synthetically generated peptide
CCEACPACTGA

SEQ ID NO: 5905 - protein, 11 aa, Artificial Sequence
  Synthetically generated peptide
CCEACNACTGA

SEQ ID NO: 5906 - protein, 11 aa, Artificial Sequence
  Synthetically generated peptide
CCEACNPCTGA

SEQ ID NO: 5907 - protein, 11 aa, Artificial Sequence
  Synthetically generated peptide
CCEACNPACGA

SEQ ID NO: 5908 - protein, 11 aa, Artificial Sequence
  Synthetically generated peptide
CCEACNPACTA

SEQ ID NO: 5909 - protein, 12 aa, Artificial Sequence
  Synthetically generated peptide
CCEYACPACTGA

SEQ ID NO: 5910 - protein, 11 aa, Artificial Sequence
  Synthetically generated peptide
CCEYACACTGA

SEQ ID NO: 5911 - protein, 11 aa, Artificial Sequence
  Synthetically generated peptide
CCEYACPCTGA

SEQ ID NO: 5912 - protein, 11 aa, Artificial Sequence
  Synthetically generated peptide
CCEYACPACGA

SEQ ID NO: 5913 - protein, 11 aa, Artificial Sequence
  Synthetically generated peptide
CCEYACPACTA

SEQ ID NO: 5914 - protein, 12 aa, Artificial Sequence
  Synthetically generated peptide
CCEYACNACTGA

SEQ ID NO: 5915 - protein, 11 aa, Artificial Sequence
  Synthetically generated peptide
CCEYACNCTGA

SEQ ID NO: 5916 - protein, 11 aa, Artificial Sequence
  Synthetically generated peptide
CCEYACNACGA

SEQ ID NO: 5917 - protein, 11 aa, Artificial Sequence
  Synthetically generated peptide
CCEYACNACTA

SEQ ID NO: 5918 - protein, 12 aa, Artificial Sequence
  Synthetically generated peptide
CCEYACNPCTGA

SEQ ID NO: 5919 - protein, 11 aa, Artificial Sequence
  Synthetically generated peptide
CCEYACNPCGA

SEQ ID NO: 5920 - protein, 11 aa, Artificial Sequence
  Synthetically generated peptide
CCEYACNPCTA

SEQ ID NO: 5921 - protein, 12 aa, Artificial Sequence
  Synthetically generated peptide
CCEYACNPACGA

SEQ ID NO: 5922 - protein, 11 aa, Artificial Sequence
  Synthetically generated peptide
CCEYACNPACA

SEQ ID NO: 5923 - protein, 12 aa, Artificial Sequence
  Synthetically generated peptide
CCEYACNPACTA

SEQ ID NO: 5924 - protein, 13 aa, Artificial Sequence
  Synthetically generated peptide
ACEFCANPACTGC

SEQ ID NO: 5925 - protein, 12 aa, Artificial Sequence
  Synthetically generated peptide
ACFCANPACTGC

SEQ ID NO: 5926 - protein, 11 aa, Artificial Sequence
  Synthetically generated peptide
ACCANPACTGC

SEQ ID NO: 5927 - protein, 11 aa, Artificial Sequence
  Synthetically generated peptide
ACFCAPACTGC

SEQ ID NO: 5928 - protein, 11 aa, Artificial Sequence
  Synthetically generated peptide
ACFCANACTGC

SEQ ID NO: 5929 - protein, 11 aa, Artificial Sequence
  Synthetically generated peptide
ACFCANPCTGC

SEQ ID NO: 5930 - protein, 11 aa, Artificial Sequence
  Synthetically generated peptide
ACFCANPACGC

SEQ ID NO: 5931 - protein, 11 aa, Artificial Sequence
  Synthetically generated peptide
ACFCANPACTC

SEQ ID NO: 5932 - protein, 12 aa, Artificial Sequence
  Synthetically generated peptide
ACECANPACTGC

SEQ ID NO: 5933 - protein, 11 aa, Artificial Sequence
  Synthetically generated peptide
ACECAPACTGC

SEQ ID NO: 5934 - protein, 11 aa, Artificial Sequence
  Synthetically generated peptide
ACECANACTGC

SEQ ID NO: 5935 - protein, 11 aa, Artificial Sequence
  Synthetically generated peptide
ACECANPCTGC

SEQ ID NO: 5936 - protein, 11 aa, Artificial Sequence
  Synthetically generated peptide
ACECANPACGC

SEQ ID NO: 5937 - protein, 11 aa, Artificial Sequence
  Synthetically generated peptide
ACECANPACTC

SEQ ID NO: 5938 - protein, 12 aa, Artificial Sequence
  Synthetically generated peptide
ACEFCAPACTGC

SEQ ID NO: 5939 - protein, 11 aa, Artificial Sequence
  Synthetically generated peptide
ACEFCAACTGC

SEQ ID NO: 5940 - protein, 11 aa, Artificial Sequence
  Synthetically generated peptide
ACEFCAPCTGC

SEQ ID NO: 5941 - protein, 11 aa, Artificial Sequence
  Synthetically generated peptide
ACEFCAPACGC

SEQ ID NO: 5942 - protein, 11 aa, Artificial Sequence
  Synthetically generated peptide
ACEFCAPACTC

SEQ ID NO: 5943 - protein, 12 aa, Artificial Sequence
  Synthetically generated peptide
ACEFCANACTGC

SEQ ID NO: 5944 - protein, 11 aa, Artificial Sequence
  Synthetically generated peptide
ACEFCANCTGC

SEQ ID NO: 5945 - protein, 11 aa, Artificial Sequence
  Synthetically generated peptide
ACEFCANACGC

SEQ ID NO: 5946 - protein, 11 aa, Artificial Sequence
  Synthetically generated peptide
ACEFCANACTC

SEQ ID NO: 5947 - protein, 12 aa, Artificial Sequence
  Synthetically generated peptide
ACEFCANPCTGC

SEQ ID NO: 5948 - protein, 11 aa, Artificial Sequence
  Synthetically generated peptide
ACEFCANPCGC

SEQ ID NO: 5949 - protein, 11 aa, Artificial Sequence
  Synthetically generated peptide
ACEFCANPCTC

SEQ ID NO: 5950 - protein, 12 aa, Artificial Sequence
  Synthetically generated peptide
ACEFCANPACGC

SEQ ID NO: 5951 - protein, 11 aa, Artificial Sequence
  Synthetically generated peptide
ACEFCANPACC

SEQ ID NO: 5952 - protein, 12 aa, Artificial Sequence
  Synthetically generated peptide
ACEFCANPACTC

SEQ ID NO: 5953 - protein, 13 aa, Artificial Sequence
  Synthetically generated peptide
CCEFACNPACTGA

SEQ ID NO: 5954 - protein, 12 aa, Artificial Sequence
  Synthetically generated peptide
CCFACNPACTGA

SEQ ID NO: 5955 - protein, 11 aa, Artificial Sequence
  Synthetically generated peptide
CCACNPACTGA

SEQ ID NO: 5956 - protein, 11 aa, Artificial Sequence
  Synthetically generated peptide
CCFACPACTGA

SEQ ID NO: 5957 - protein, 11 aa, Artificial Sequence
  Synthetically generated peptide
CCFACNACTGA

SEQ ID NO: 5958 - protein, 11 aa, Artificial Sequence
  Synthetically generated peptide
CCFACNPCTGA

SEQ ID NO: 5959 - protein, 11 aa, Artificial Sequence
  Synthetically generated peptide
CCFACNPACGA

SEQ ID NO: 5960 - protein, 11 aa, Artificial Sequence
  Synthetically generated peptide
CCFACNPACTA

SEQ ID NO: 5961 - protein, 12 aa, Artificial Sequence
  Synthetically generated peptide
CCEACNPACTGA

SEQ ID NO: 5962 - protein, 11 aa, Artificial Sequence
  Synthetically generated peptide
CCEACPACTGA

SEQ ID NO: 5963 - protein, 11 aa, Artificial Sequence
  Synthetically generated peptide
CCEACNACTGA

SEQ ID NO: 5964 - protein, 11 aa, Artificial Sequence
  Synthetically generated peptide
CCEACNPCTGA

SEQ ID NO: 5965 - protein, 11 aa, Artificial Sequence
  Synthetically generated peptide
CCEACNPACGA

SEQ ID NO: 5966 - protein, 11 aa, Artificial Sequence
  Synthetically generated peptide
CCEACNPACTA

SEQ ID NO: 5967 - protein, 12 aa, Artificial Sequence
  Synthetically generated peptide
CCEFACPACTGA

SEQ ID NO: 5968 - protein, 11 aa, Artificial Sequence
  Synthetically generated peptide
CCEFACACTGA

SEQ ID NO: 5969 - protein, 11 aa, Artificial Sequence
  Synthetically generated peptide
CCEFACPCTGA

SEQ ID NO: 5970 - protein, 11 aa, Artificial Sequence
  Synthetically generated peptide
CCEFACPACGA

SEQ ID NO: 5971 - protein, 11 aa, Artificial Sequence
  Synthetically generated peptide
CCEFACPACTA

SEQ ID NO: 5972 - protein, 12 aa, Artificial Sequence
  Synthetically generated peptide
CCEFACNACTGA

SEQ ID NO: 5973 - protein, 11 aa, Artificial Sequence
  Synthetically generated peptide
CCEFACNCTGA

SEQ ID NO: 5974 - protein, 11 aa, Artificial Sequence
  Synthetically generated peptide
CCEFACNACGA

SEQ ID NO: 5975 - protein, 11 aa, Artificial Sequence
  Synthetically generated peptide
CCEFACNACTA

SEQ ID NO: 5976 - protein, 12 aa, Artificial Sequence
  Synthetically generated peptide
CCEFACNPCTGA

SEQ ID NO: 5977 - protein, 11 aa, Artificial Sequence
  Synthetically generated peptide
CCEFACNPCGA

SEQ ID NO: 5978 - protein, 11 aa, Artificial Sequence
  Synthetically generated peptide
CCEFACNPCTA

SEQ ID NO: 5979 - protein, 12 aa, Artificial Sequence
  Synthetically generated peptide
CCEFACNPACGA

SEQ ID NO: 5980 - protein, 11 aa, Artificial Sequence
  Synthetically generated peptide
CCEFACNPACA

SEQ ID NO: 5981 - protein, 12 aa, Artificial Sequence
  Synthetically generated peptide
CCEFACNPACTA

SEQ ID NO: 5982 - protein, 13 aa, Artificial Sequence
  Synthetically generated peptide
ACEWCANPACTGC

SEQ ID NO: 5983 - protein, 12 aa, Artificial Sequence
  Synthetically generated peptide
ACWCANPACTGC

SEQ ID NO: 5984 - protein, 11 aa, Artificial Sequence
  Synthetically generated peptide
ACCANPACTGC

SEQ ID NO: 5985 - protein, 11 aa, Artificial Sequence
  Synthetically generated peptide
ACWCAPACTGC

SEQ ID NO: 5986 - protein, 11 aa, Artificial Sequence
  Synthetically generated peptide
ACWCANACTGC

SEQ ID NO: 5987 - protein, 11 aa, Artificial Sequence
  Synthetically generated peptide
ACWCANPCTGC

SEQ ID NO: 5988 - protein, 11 aa, Artificial Sequence
  Synthetically generated peptide
ACWCANPACGC

SEQ ID NO: 5989 - protein, 11 aa, Artificial Sequence
  Synthetically generated peptide
ACWCANPACTC

SEQ ID NO: 5990 - protein, 12 aa, Artificial Sequence
  Synthetically generated peptide
ACECANPACTGC

SEQ ID NO: 5991 - protein, 11 aa, Artificial Sequence
  Synthetically generated peptide
ACECAPACTGC

SEQ ID NO: 5992 - protein, 11 aa, Artificial Sequence
  Synthetically generated peptide
ACECANACTGC

SEQ ID NO: 5993 - protein, 11 aa, Artificial Sequence
  Synthetically generated peptide
ACECANPCTGC

SEQ ID NO: 5994 - protein, 11 aa, Artificial Sequence
  Synthetically generated peptide
ACECANPACGC

SEQ ID NO: 5995 - protein, 11 aa, Artificial Sequence
  Synthetically generated peptide
ACECANPACTC

SEQ ID NO: 5996 - protein, 12 aa, Artificial Sequence
  Synthetically generated peptide
ACEWCAPACTGC

SEQ ID NO: 5997 - protein, 11 aa, Artificial Sequence
  Synthetically generated peptide
ACEWCAACTGC

SEQ ID NO: 5998 - protein, 11 aa, Artificial Sequence
  Synthetically generated peptide
ACEWCAPCTGC

SEQ ID NO: 5999 - protein, 11 aa, Artificial Sequence
  Synthetically generated peptide
ACEWCAPACGC

SEQ ID NO: 6000 - protein, 11 aa, Artificial Sequence
  Synthetically generated peptide
ACEWCAPACTC

SEQ ID NO: 6001 - protein, 12 aa, Artificial Sequence
  Synthetically generated peptide
ACEWCANACTGC

SEQ ID NO: 6002 - protein, 11 aa, Artificial Sequence
  Synthetically generated peptide
ACEWCANCTGC

SEQ ID NO: 6003 - protein, 11 aa, Artificial Sequence
  Synthetically generated peptide
ACEWCANACGC

SEQ ID NO: 6004 - protein, 11 aa, Artificial Sequence
  Synthetically generated peptide
ACEWCANACTC

SEQ ID NO: 6005 - protein, 12 aa, Artificial Sequence
  Synthetically generated peptide
ACEWCANPCTGC

SEQ ID NO: 6006 - protein, 11 aa, Artificial Sequence
  Synthetically generated peptide
ACEWCANPCGC

SEQ ID NO: 6007 - protein, 11 aa, Artificial Sequence
  Synthetically generated peptide
ACEWCANPCTC

SEQ ID NO: 6008 - protein, 12 aa, Artificial Sequence
  Synthetically generated peptide
ACEWCANPACGC

SEQ ID NO: 6009 - protein, 11 aa, Artificial Sequence
  Synthetically generated peptide
ACEWCANPACC

SEQ ID NO: 6010 - protein, 12 aa, Artificial Sequence
  Synthetically generated peptide
ACEWCANPACTC

SEQ ID NO: 6011 - protein, 13 aa, Artificial Sequence
  Synthetically generated peptide
CCEWACNPACTGA

SEQ ID NO: 6012 - protein, 12 aa, Artificial Sequence
  Synthetically generated peptide
ACLCANPACTGC

SEQ ID NO: 6013 - protein, 11 aa, Artificial Sequence
  Synthetically generated peptide
ACCANPACTGC

SEQ ID NO: 6014 - protein, 11 aa, Artificial Sequence
  Synthetically generated peptide
ACLCAPACTGC

SEQ ID NO: 6015 - protein, 11 aa, Artificial Sequence
  Synthetically generated peptide
ACLCANACTGC

SEQ ID NO: 6016 - protein, 11 aa, Artificial Sequence
  Synthetically generated peptide
ACLCANPCTGC

SEQ ID NO: 6017 - protein, 11 aa, Artificial Sequence
  Synthetically generated peptide
ACLCANPACGC

SEQ ID NO: 6018 - protein, 11 aa, Artificial Sequence
  Synthetically generated peptide
ACLCANPACTC

SEQ ID NO: 6019 - protein, 12 aa, Artificial Sequence
  Synthetically generated peptide
ACECANPACTGC

SEQ ID NO: 6020 - protein, 11 aa, Artificial Sequence
  Synthetically generated peptide
ACECAPACTGC

SEQ ID NO: 6021 - protein, 11 aa, Artificial Sequence
  Synthetically generated peptide
ACECANACTGC

SEQ ID NO: 6022 - protein, 11 aa, Artificial Sequence
  Synthetically generated peptide
ACECANPCTGC

SEQ ID NO: 6023 - protein, 11 aa, Artificial Sequence
  Synthetically generated peptide
ACECANPACGC

SEQ ID NO: 6024 - protein, 11 aa, Artificial Sequence
  Synthetically generated peptide
ACECANPACTC

SEQ ID NO: 6025 - protein, 12 aa, Artificial Sequence
  Synthetically generated peptide
ACELCAPACTGC

SEQ ID NO: 6026 - protein, 11 aa, Artificial Sequence
  Synthetically generated peptide
ACELCAACTGC

SEQ ID NO: 6027 - protein, 11 aa, Artificial Sequence
  Synthetically generated peptide
ACELCAPCTGC

SEQ ID NO: 6028 - protein, 11 aa, Artificial Sequence
  Synthetically generated peptide
ACELCAPACGC

SEQ ID NO: 6029 - protein, 11 aa, Artificial Sequence
  Synthetically generated peptide
ACELCAPACTC

SEQ ID NO: 6030 - protein, 12 aa, Artificial Sequence
  Synthetically generated peptide
ACELCANACTGC

SEQ ID NO: 6031 - protein, 11 aa, Artificial Sequence
  Synthetically generated peptide
ACELCANCTGC

SEQ ID NO: 6032 - protein, 11 aa, Artificial Sequence
  Synthetically generated peptide
ACELCANACGC

SEQ ID NO: 6033 - protein, 11 aa, Artificial Sequence
  Synthetically generated peptide
ACELCANACTC

SEQ ID NO: 6034 - protein, 12 aa, Artificial Sequence
  Synthetically generated peptide
ACELCANPCTGC

SEQ ID NO: 6035 - protein, 11 aa, Artificial Sequence
  Synthetically generated peptide
ACELCANPCGC

SEQ ID NO: 6036 - protein, 11 aa, Artificial Sequence
  Synthetically generated peptide
ACELCANPCTC

SEQ ID NO: 6037 - protein, 12 aa, Artificial Sequence
  Synthetically generated peptide
ACELCANPACGC

SEQ ID NO: 6038 - protein, 11 aa, Artificial Sequence
  Synthetically generated peptide
ACELCANPACC

SEQ ID NO: 6039 - protein, 12 aa, Artificial Sequence
  Synthetically generated peptide
ACELCANPACTC

SEQ ID NO: 6040 - protein, 13 aa, Artificial Sequence
  Synthetically generated peptide
CCELACNPACTGA

SEQ ID NO: 6041 - protein, 12 aa, Artificial Sequence
  Synthetically generated peptide
CCLACNPACTGA

SEQ ID NO: 6042 - protein, 11 aa, Artificial Sequence
  Synthetically generated peptide
CCACNPACTGA

SEQ ID NO: 6043 - protein, 11 aa, Artificial Sequence
  Synthetically generated peptide
CCLACPACTGA

SEQ ID NO: 6044 - protein, 11 aa, Artificial Sequence
  Synthetically generated peptide
CCLACNACTGA

SEQ ID NO: 6045 - protein, 11 aa, Artificial Sequence
  Synthetically generated peptide
CCLACNPCTGA

SEQ ID NO: 6046 - protein, 11 aa, Artificial Sequence
  Synthetically generated peptide
CCLACNPACGA

SEQ ID NO: 6047 - protein, 11 aa, Artificial Sequence
  Synthetically generated peptide
CCLACNPACTA

SEQ ID NO: 6048 - protein, 12 aa, Artificial Sequence
  Synthetically generated peptide
CCEACNPACTGA

SEQ ID NO: 6049 - protein, 11 aa, Artificial Sequence
  Synthetically generated peptide
CCEACPACTGA

SEQ ID NO: 6050 - protein, 11 aa, Artificial Sequence
  Synthetically generated peptide
CCEACNACTGA

SEQ ID NO: 6051 - protein, 11 aa, Artificial Sequence
  Synthetically generated peptide
CCEACNPCTGA

SEQ ID NO: 6052 - protein, 11 aa, Artificial Sequence
  Synthetically generated peptide
CCEACNPACGA

SEQ ID NO: 6053 - protein, 11 aa, Artificial Sequence
  Synthetically generated peptide
CCEACNPACTA

SEQ ID NO: 6054 - protein, 12 aa, Artificial Sequence
  Synthetically generated peptide
CCELACPACTGA

SEQ ID NO: 6055 - protein, 11 aa, Artificial Sequence
  Synthetically generated peptide
CCELACACTGA

SEQ ID NO: 6056 - protein, 11 aa, Artificial Sequence
  Synthetically generated peptide
CCELACPCTGA

SEQ ID NO: 6057 - protein, 11 aa, Artificial Sequence
  Synthetically generated peptide
CCELACPACGA

SEQ ID NO: 6058 - protein, 11 aa, Artificial Sequence
  Synthetically generated peptide
CCELACPACTA

SEQ ID NO: 6059 - protein, 12 aa, Artificial Sequence
  Synthetically generated peptide
CCELACNACTGA

SEQ ID NO: 6060 - protein, 11 aa, Artificial Sequence
  Synthetically generated peptide
CCELACNCTGA

SEQ ID NO: 6061 - protein, 11 aa, Artificial Sequence
  Synthetically generated peptide
CCELACNACGA

SEQ ID NO: 6062 - protein, 11 aa, Artificial Sequence
  Synthetically generated peptide
CCELACNACTA

SEQ ID NO: 6063 - protein, 12 aa, Artificial Sequence
  Synthetically generated peptide
CCELACNPCTGA

SEQ ID NO: 6064 - protein, 11 aa, Artificial Sequence
  Synthetically generated peptide
CCELACNPCGA

SEQ ID NO: 6065 - protein, 11 aa, Artificial Sequence
  Synthetically generated peptide
CCELACNPCTA

SEQ ID NO: 6066 - protein, 12 aa, Artificial Sequence
  Synthetically generated peptide
CCELACNPACGA

SEQ ID NO: 6067 - protein, 11 aa, Artificial Sequence
  Synthetically generated peptide
CCELACNPACA

SEQ ID NO: 6068 - protein, 12 aa, Artificial Sequence
  Synthetically generated peptide
CCELACNPACTA

SEQ ID NO: 6069 - protein, 13 aa, Artificial Sequence
  Synthetically generated peptide
ACEYCANPACTGC

SEQ ID NO: 6070 - protein, 12 aa, Artificial Sequence
  Synthetically generated peptide
ACYCANPACTGC

SEQ ID NO: 6071 - protein, 11 aa, Artificial Sequence
  Synthetically generated peptide
ACCANPACTGC

SEQ ID NO: 6072 - protein, 11 aa, Artificial Sequence
  Synthetically generated peptide
ACYCAPACTGC

SEQ ID NO: 6073 - protein, 11 aa, Artificial Sequence
  Synthetically generated peptide
ACYCANACTGC

SEQ ID NO: 6074 - protein, 11 aa, Artificial Sequence
  Synthetically generated peptide
ACYCANPCTGC

SEQ ID NO: 6075 - protein, 11 aa, Artificial Sequence
  Synthetically generated peptide
ACYCANPACGC

SEQ ID NO: 6076 - protein, 11 aa, Artificial Sequence
  Synthetically generated peptide
ACYCANPACTC

SEQ ID NO: 6077 - protein, 12 aa, Artificial Sequence
  Synthetically generated peptide
ACECANPACTGC

SEQ ID NO: 6078 - protein, 11 aa, Artificial Sequence
  Synthetically generated peptide
ACECAPACTGC

SEQ ID NO: 6079 - protein, 11 aa, Artificial Sequence
  Synthetically generated peptide
ACECANACTGC

SEQ ID NO: 6080 - protein, 11 aa, Artificial Sequence
  Synthetically generated peptide
ACECANPCTGC

SEQ ID NO: 6081 - protein, 11 aa, Artificial Sequence
  Synthetically generated peptide
ACECANPACGC

SEQ ID NO: 6082 - protein, 11 aa, Artificial Sequence
  Synthetically generated peptide
ACECANPACTC

SEQ ID NO: 6083 - protein, 12 aa, Artificial Sequence
  Synthetically generated peptide
ACEYCAPACTGC

SEQ ID NO: 6084 - protein, 11 aa, Artificial Sequence
  Synthetically generated peptide
ACEYCAACTGC

SEQ ID NO: 6085 - protein, 11 aa, Artificial Sequence
  Synthetically generated peptide
ACEYCAPCTGC

SEQ ID NO: 6086 - protein, 11 aa, Artificial Sequence
  Synthetically generated peptide
ACEYCAPACGC

SEQ ID NO: 6087 - protein, 11 aa, Artificial Sequence
  Synthetically generated peptide
ACEYCAPACTC

SEQ ID NO: 6088 - protein, 12 aa, Artificial Sequence
  Synthetically generated peptide
ACEYCANACTGC

SEQ ID NO: 6089 - protein, 11 aa, Artificial Sequence
  Synthetically generated peptide
ACEYCANCTGC

SEQ ID NO: 6090 - protein, 11 aa, Artificial Sequence
  Synthetically generated peptide
ACEYCANACGC

SEQ ID NO: 6091 - protein, 11 aa, Artificial Sequence
  Synthetically generated peptide
ACEYCANACTC

SEQ ID NO: 6092 - protein, 12 aa, Artificial Sequence
  Synthetically generated peptide
ACEYCANPCTGC

SEQ ID NO: 6093 - protein, 11 aa, Artificial Sequence
  Synthetically generated peptide
ACEYCANPCGC

SEQ ID NO: 6094 - protein, 11 aa, Artificial Sequence
  Synthetically generated peptide
ACEYCANPCTC

SEQ ID NO: 6095 - protein, 12 aa, Artificial Sequence
  Synthetically generated peptide
ACEYCANPACGC

SEQ ID NO: 6096 - protein, 11 aa, Artificial Sequence
  Synthetically generated peptide
ACEYCANPACC

SEQ ID NO: 6097 - protein, 12 aa, Artificial Sequence
  Synthetically generated peptide
ACEYCANPACTC

SEQ ID NO: 6098 - protein, 13 aa, Artificial Sequence
  Synthetically generated peptide
CCEYACNPACTGA

SEQ ID NO: 6099 - protein, 12 aa, Artificial Sequence
  Synthetically generated peptide
CCYACNPACTGA

SEQ ID NO: 6100 - protein, 11 aa, Artificial Sequence
  Synthetically generated peptide
CCACNPACTGA

SEQ ID NO: 6101 - protein, 11 aa, Artificial Sequence
  Synthetically generated peptide
CCYACPACTGA

SEQ ID NO: 6102 - protein, 11 aa, Artificial Sequence
  Synthetically generated peptide
CCYACNACTGA

SEQ ID NO: 6103 - protein, 11 aa, Artificial Sequence
  Synthetically generated peptide
CCYACNPCTGA

SEQ ID NO: 6104 - protein, 11 aa, Artificial Sequence
  Synthetically generated peptide
CCYACNPACGA

SEQ ID NO: 6105 - protein, 11 aa, Artificial Sequence
  Synthetically generated peptide
CCYACNPACTA

SEQ ID NO: 6106 - protein, 12 aa, Artificial Sequence
  Synthetically generated peptide
CCEACNPACTGA

SEQ ID NO: 6107 - protein, 11 aa, Artificial Sequence
  Synthetically generated peptide
CCEACPACTGA

SEQ ID NO: 6108 - protein, 11 aa, Artificial Sequence
  Synthetically generated peptide
CCEACNACTGA

SEQ ID NO: 6109 - protein, 11 aa, Artificial Sequence
  Synthetically generated peptide
CCEACNPCTGA

SEQ ID NO: 6110 - protein, 11 aa, Artificial Sequence
  Synthetically generated peptide
CCEACNPACGA

SEQ ID NO: 6111 - protein, 11 aa, Artificial Sequence
  Synthetically generated peptide
CCEACNPACTA

SEQ ID NO: 6112 - protein, 12 aa, Artificial Sequence
  Synthetically generated peptide
CCEYACPACTGA

SEQ ID NO: 6113 - protein, 11 aa, Artificial Sequence
  Synthetically generated peptide
CCEYACACTGA

SEQ ID NO: 6114 - protein, 11 aa, Artificial Sequence
  Synthetically generated peptide
CCEYACPCTGA

SEQ ID NO: 6115 - protein, 11 aa, Artificial Sequence
  Synthetically generated peptide
CCEYACPACGA

SEQ ID NO: 6116 - protein, 11 aa, Artificial Sequence
  Synthetically generated peptide
CCEYACPACTA

SEQ ID NO: 6117 - protein, 12 aa, Artificial Sequence
  Synthetically generated peptide
CCEYACNACTGA

SEQ ID NO: 6118 - protein, 11 aa, Artificial Sequence
  Synthetically generated peptide
CCEYACNCTGA

SEQ ID NO: 6119 - protein, 11 aa, Artificial Sequence
  Synthetically generated peptide
CCEYACNACGA

SEQ ID NO: 6120 - protein, 11 aa, Artificial Sequence
  Synthetically generated peptide
CCEYACNACTA

SEQ ID NO: 6121 - protein, 12 aa, Artificial Sequence
  Synthetically generated peptide
CCEYACNPCTGA

SEQ ID NO: 6122 - protein, 11 aa, Artificial Sequence
  Synthetically generated peptide
CCEYACNPCGA

SEQ ID NO: 6123 - protein, 11 aa, Artificial Sequence
  Synthetically generated peptide
CCEYACNPCTA

SEQ ID NO: 6124 - protein, 12 aa, Artificial Sequence
  Synthetically generated peptide
CCEYACNPACGA

SEQ ID NO: 6125 - protein, 11 aa, Artificial Sequence
  Synthetically generated peptide
CCEYACNPACA

SEQ ID NO: 6126 - protein, 12 aa, Artificial Sequence
  Synthetically generated peptide
CCEYACNPACTA

SEQ ID NO: 6127 - protein, 13 aa, Artificial Sequence
  Synthetically generated peptide
ACEFCANPACTGC

SEQ ID NO: 6128 - protein, 12 aa, Artificial Sequence
  Synthetically generated peptide
ACFCANPACTGC

SEQ ID NO: 6129 - protein, 11 aa, Artificial Sequence
  Synthetically generated peptide
ACCANPACTGC

SEQ ID NO: 6130 - protein, 11 aa, Artificial Sequence
  Synthetically generated peptide
ACFCAPACTGC

SEQ ID NO: 6131 - protein, 11 aa, Artificial Sequence
  Synthetically generated peptide
ACFCANACTGC

SEQ ID NO: 6132 - protein, 11 aa, Artificial Sequence
  Synthetically generated peptide
ACFCANPCTGC

SEQ ID NO: 6133 - protein, 11 aa, Artificial Sequence
  Synthetically generated peptide
ACFCANPACGC

SEQ ID NO: 6134 - protein, 11 aa, Artificial Sequence
  Synthetically generated peptide
ACFCANPACTC

SEQ ID NO: 6135 - protein, 12 aa, Artificial Sequence
  Synthetically generated peptide
ACECANPACTGC

SEQ ID NO: 6136 - protein, 11 aa, Artificial Sequence
  Synthetically generated peptide
ACECAPACTGC

SEQ ID NO: 6137 - protein, 11 aa, Artificial Sequence
  Synthetically generated peptide
ACECANACTGC

SEQ ID NO: 6138 - protein, 11 aa, Artificial Sequence
  Synthetically generated peptide
ACECANPCTGC

SEQ ID NO: 6139 - protein, 11 aa, Artificial Sequence
  Synthetically generated peptide
ACECANPACGC

SEQ ID NO: 6140 - protein, 11 aa, Artificial Sequence
  Synthetically generated peptide
ACECANPACTC

SEQ ID NO: 6141 - protein, 12 aa, Artificial Sequence
  Synthetically generated peptide
ACEFCAPACTGC

SEQ ID NO: 6142 - protein, 11 aa, Artificial Sequence
  Synthetically generated peptide
ACEFCAACTGC

SEQ ID NO: 6143 - protein, 11 aa, Artificial Sequence
  Synthetically generated peptide
ACEFCAPCTGC

SEQ ID NO: 6144 - protein, 11 aa, Artificial Sequence
  Synthetically generated peptide
ACEFCAPACGC

SEQ ID NO: 6145 - protein, 11 aa, Artificial Sequence
  Synthetically generated peptide
ACEFCAPACTC

SEQ ID NO: 6146 - protein, 12 aa, Artificial Sequence
  Synthetically generated peptide
ACEFCANACTGC

SEQ ID NO: 6147 - protein, 11 aa, Artificial Sequence
  Synthetically generated peptide
ACEFCANCTGC

SEQ ID NO: 6148 - protein, 11 aa, Artificial Sequence
  Synthetically generated peptide
ACEFCANACGC

SEQ ID NO: 6149 - protein, 11 aa, Artificial Sequence
  Synthetically generated peptide
ACEFCANACTC

SEQ ID NO: 6150 - protein, 12 aa, Artificial Sequence
  Synthetically generated peptide
ACEFCANPCTGC

SEQ ID NO: 6151 - protein, 11 aa, Artificial Sequence
  Synthetically generated peptide
ACEFCANPCGC

SEQ ID NO: 6152 - protein, 11 aa, Artificial Sequence
  Synthetically generated peptide
ACEFCANPCTC

SEQ ID NO: 6153 - protein, 12 aa, Artificial Sequence
  Synthetically generated peptide
ACEFCANPACGC

SEQ ID NO: 6154 - protein, 11 aa, Artificial Sequence
  Synthetically generated peptide
ACEFCANPACC

SEQ ID NO: 6155 - protein, 12 aa, Artificial Sequence
  Synthetically generated peptide
ACEFCANPACTC

SEQ ID NO: 6156 - protein, 13 aa, Artificial Sequence
  Synthetically generated peptide
CCEFACNPACTGA

SEQ ID NO: 6157 - protein, 12 aa, Artificial Sequence
  Synthetically generated peptide
CCFACNPACTGA

SEQ ID NO: 6158 - protein, 11 aa, Artificial Sequence
  Synthetically generated peptide
CCACNPACTGA

SEQ ID NO: 6159 - protein, 11 aa, Artificial Sequence
  Synthetically generated peptide
CCFACPACTGA

SEQ ID NO: 6160 - protein, 11 aa, Artificial Sequence
  Synthetically generated peptide
CCFACNACTGA

SEQ ID NO: 6161 - protein, 11 aa, Artificial Sequence
  Synthetically generated peptide
CCFACNPCTGA

SEQ ID NO: 6162 - protein, 11 aa, Artificial Sequence
  Synthetically generated peptide
CCFACNPACGA

SEQ ID NO: 6163 - protein, 11 aa, Artificial Sequence
  Synthetically generated peptide
CCFACNPACTA

SEQ ID NO: 6164 - protein, 12 aa, Artificial Sequence
  Synthetically generated peptide
CCEACNPACTGA

SEQ ID NO: 6165 - protein, 11 aa, Artificial Sequence
  Synthetically generated peptide
CCEACPACTGA

SEQ ID NO: 6166 - protein, 11 aa, Artificial Sequence
  Synthetically generated peptide
CCEACNACTGA

SEQ ID NO: 6167 - protein, 11 aa, Artificial Sequence
  Synthetically generated peptide
CCEACNPCTGA

SEQ ID NO: 6168 - protein, 11 aa, Artificial Sequence
  Synthetically generated peptide
CCEACNPACGA

SEQ ID NO: 6169 - protein, 11 aa, Artificial Sequence
  Synthetically generated peptide
CCEACNPACTA

SEQ ID NO: 6170 - protein, 12 aa, Artificial Sequence
  Synthetically generated peptide
CCEFACPACTGA

SEQ ID NO: 6171 - protein, 11 aa, Artificial Sequence
  Synthetically generated peptide
CCEFACACTGA

SEQ ID NO: 6172 - protein, 11 aa, Artificial Sequence
  Synthetically generated peptide
CCEFACPCTGA

SEQ ID NO: 6173 - protein, 11 aa, Artificial Sequence
  Synthetically generated peptide
CCEFACPACGA

SEQ ID NO: 6174 - protein, 11 aa, Artificial Sequence
  Synthetically generated peptide
CCEFACPACTA

SEQ ID NO: 6175 - protein, 12 aa, Artificial Sequence
  Synthetically generated peptide
CCEFACNACTGA

SEQ ID NO: 6176 - protein, 11 aa, Artificial Sequence
  Synthetically generated peptide
CCEFACNCTGA

SEQ ID NO: 6177 - protein, 11 aa, Artificial Sequence
  Synthetically generated peptide
CCEFACNACGA

SEQ ID NO: 6178 - protein, 11 aa, Artificial Sequence
  Synthetically generated peptide
CCEFACNACTA

SEQ ID NO: 6179 - protein, 12 aa, Artificial Sequence
  Synthetically generated peptide
CCEFACNPCTGA

SEQ ID NO: 6180 - protein, 11 aa, Artificial Sequence
  Synthetically generated peptide
CCEFACNPCGA

SEQ ID NO: 6181 - protein, 11 aa, Artificial Sequence
  Synthetically generated peptide
CCEFACNPCTA

SEQ ID NO: 6182 - protein, 12 aa, Artificial Sequence
  Synthetically generated peptide
CCEFACNPACGA

SEQ ID NO: 6183 - protein, 11 aa, Artificial Sequence
  Synthetically generated peptide
CCEFACNPACA

SEQ ID NO: 6184 - protein, 12 aa, Artificial Sequence
  Synthetically generated peptide
CCEFACNPACTA

SEQ ID NO: 6185 - protein, 13 aa, Artificial Sequence
  Synthetically generated peptide
ACEWCANPACTGC

SEQ ID NO: 6186 - protein, 12 aa, Artificial Sequence
  Synthetically generated peptide
ACWCANPACTGC

SEQ ID NO: 6187 - protein, 11 aa, Artificial Sequence
  Synthetically generated peptide
ACCANPACTGC

SEQ ID NO: 6188 - protein, 11 aa, Artificial Sequence
  Synthetically generated peptide
ACWCAPACTGC

SEQ ID NO: 6189 - protein, 11 aa, Artificial Sequence
  Synthetically generated peptide
ACWCANACTGC

SEQ ID NO: 6190 - protein, 11 aa, Artificial Sequence
  Synthetically generated peptide
ACWCANPCTGC

SEQ ID NO: 6191 - protein, 11 aa, Artificial Sequence
  Synthetically generated peptide
ACWCANPACGC

SEQ ID NO: 6192 - protein, 11 aa, Artificial Sequence
  Synthetically generated peptide
ACWCANPACTC

SEQ ID NO: 6193 - protein, 12 aa, Artificial Sequence
  Synthetically generated peptide
ACECANPACTGC

SEQ ID NO: 6194 - protein, 11 aa, Artificial Sequence
  Synthetically generated peptide
ACECAPACTGC

SEQ ID NO: 6195 - protein, 11 aa, Artificial Sequence
  Synthetically generated peptide
ACECANACTGC

SEQ ID NO: 6196 - protein, 11 aa, Artificial Sequence
  Synthetically generated peptide
ACECANPCTGC

SEQ ID NO: 6197 - protein, 11 aa, Artificial Sequence
  Synthetically generated peptide
ACECANPACGC

SEQ ID NO: 6198 - protein, 11 aa, Artificial Sequence
  Synthetically generated peptide
ACECANPACTC

SEQ ID NO: 6199 - protein, 12 aa, Artificial Sequence
  Synthetically generated peptide
ACEWCAPACTGC

SEQ ID NO: 6200 - protein, 11 aa, Artificial Sequence
  Synthetically generated peptide
ACEWCAACTGC

SEQ ID NO: 6201 - protein, 11 aa, Artificial Sequence
  Synthetically generated peptide
ACEWCAPCTGC

SEQ ID NO: 6202 - protein, 11 aa, Artificial Sequence
  Synthetically generated peptide
ACEWCAPACGC

SEQ ID NO: 6203 - protein, 11 aa, Artificial Sequence
  Synthetically generated peptide
ACEWCAPACTC

SEQ ID NO: 6204 - protein, 12 aa, Artificial Sequence
  Synthetically generated peptide
ACEWCANACTGC

SEQ ID NO: 6205 - protein, 11 aa, Artificial Sequence
  Synthetically generated peptide
ACEWCANCTGC

SEQ ID NO: 6206 - protein, 11 aa, Artificial Sequence
  Synthetically generated peptide
ACEWCANACGC

SEQ ID NO: 6207 - protein, 11 aa, Artificial Sequence
  Synthetically generated peptide
ACEWCANACTC

SEQ ID NO: 6208 - protein, 12 aa, Artificial Sequence
  Synthetically generated peptide
ACEWCANPCTGC

SEQ ID NO: 6209 - protein, 11 aa, Artificial Sequence
  Synthetically generated peptide
ACEWCANPCGC

SEQ ID NO: 6210 - protein, 11 aa, Artificial Sequence
  Synthetically generated peptide
ACEWCANPCTC

SEQ ID NO: 6211 - protein, 12 aa, Artificial Sequence
  Synthetically generated peptide
ACEWCANPACGC

SEQ ID NO: 6212 - protein, 11 aa, Artificial Sequence
  Synthetically generated peptide
ACEWCANPACC

SEQ ID NO: 6213 - protein, 12 aa, Artificial Sequence
  Synthetically generated peptide
ACEWCANPACTC

SEQ ID NO: 6214 - protein, 13 aa, Artificial Sequence
  Synthetically generated peptide
CCEWACNPACTGA

SEQ ID NO: 6215 - protein, 12 aa, Artificial Sequence
  Synthetically generated peptide
CCWACNPACTGA

SEQ ID NO: 6216 - protein, 11 aa, Artificial Sequence
  Synthetically generated peptide
CCACNPACTGA

SEQ ID NO: 6217 - protein, 11 aa, Artificial Sequence
  Synthetically generated peptide
CCWACPACTGA

SEQ ID NO: 6218 - protein, 11 aa, Artificial Sequence
  Synthetically generated peptide
CCWACNACTGA

SEQ ID NO: 6219 - protein, 11 aa, Artificial Sequence
  Synthetically generated peptide
CCWACNPCTGA

SEQ ID NO: 6220 - protein, 11 aa, Artificial Sequence
  Synthetically generated peptide
CCWACNPACGA

SEQ ID NO: 6221 - protein, 11 aa, Artificial Sequence
  Synthetically generated peptide
CCWACNPACTA

SEQ ID NO: 6222 - protein, 12 aa, Artificial Sequence
  Synthetically generated peptide
CCEACNPACTGA

SEQ ID NO: 6223 - protein, 11 aa, Artificial Sequence
  Synthetically generated peptide
CCEACPACTGA

SEQ ID NO: 6224 - protein, 11 aa, Artificial Sequence
  Synthetically generated peptide
CCEACNACTGA

SEQ ID NO: 6225 - protein, 11 aa, Artificial Sequence
  Synthetically generated peptide
CCEACNPCTGA

SEQ ID NO: 6226 - protein, 11 aa, Artificial Sequence
  Synthetically generated peptide
CCEACNPACGA

SEQ ID NO: 6227 - protein, 11 aa, Artificial Sequence
  Synthetically generated peptide
CCEACNPACTA

SEQ ID NO: 6228 - protein, 12 aa, Artificial Sequence
  Synthetically generated peptide
CCEWACPACTGA

SEQ ID NO: 6229 - protein, 11 aa, Artificial Sequence
  Synthetically generated peptide
CCEWACACTGA

SEQ ID NO: 6230 - protein, 11 aa, Artificial Sequence
  Synthetically generated peptide
CCEWACPCTGA

SEQ ID NO: 6231 - protein, 11 aa, Artificial Sequence
  Synthetically generated peptide
CCEWACPACGA

SEQ ID NO: 6232 - protein, 11 aa, Artificial Sequence
  Synthetically generated peptide
CCEWACPACTA

SEQ ID NO: 6233 - protein, 12 aa, Artificial Sequence
  Synthetically generated peptide
CCEWACNACTGA

SEQ ID NO: 6234 - protein, 11 aa, Artificial Sequence
  Synthetically generated peptide
CCEWACNCTGA

SEQ ID NO: 6235 - protein, 11 aa, Artificial Sequence
  Synthetically generated peptide
CCEWACNACGA

SEQ ID NO: 6236 - protein, 11 aa, Artificial Sequence
  Synthetically generated peptide
CCEWACNACTA

SEQ ID NO: 6237 - protein, 12 aa, Artificial Sequence
  Synthetically generated peptide
CCEWACNPCTGA

SEQ ID NO: 6238 - protein, 11 aa, Artificial Sequence
  Synthetically generated peptide
CCEWACNPCGA

SEQ ID NO: 6239 - protein, 11 aa, Artificial Sequence
  Synthetically generated peptide
CCEWACNPCTA

SEQ ID NO: 6240 - protein, 12 aa, Artificial Sequence
  Synthetically generated peptide
CCEWACNPACGA

SEQ ID NO: 6241 - protein, 11 aa, Artificial Sequence
  Synthetically generated peptide
CCEWACNPACA

SEQ ID NO: 6242 - protein, 12 aa, Artificial Sequence
  Synthetically generated peptide
CCEWACNPACTA

SEQ ID NO: 6243 - protein, 14 aa, Artificial Sequence
  Synthetically generated peptide
  VARIANT (1)..(14): Xaa = Any Amino Acid
ACXELCANPACTGC

SEQ ID NO: 6244 - protein, 16 aa, Artificial Sequence
  Synthetically generated peptide
  VARIANT (1)..(16): Xaa = Any Amino Acid
AACXXELCANPACTGC

SEQ ID NO: 6245 - protein, 16 aa, Artificial Sequence
  Synthetically generated peptide
  VARIANT (1)..(16): Xaa = Any Amino Acid
ACXXXELCANPACTGC

SEQ ID NO: 6246 - protein, 18 aa, Artificial Sequence
  Synthetically generated peptide
  VARIANT (1)..(18): Xaa = Any Amino Acid
AACXXXXELCANPACTGC

SEQ ID NO: 6247 - protein, 17 aa, Artificial Sequence
  Synthetically generated peptide
  VARIANT (1)..(17): Xaa = Any Amino Acid
ACXXXEXLCANPACTGC

SEQ ID NO: 6248 - protein, 17 aa, Artificial Sequence
  Synthetically generated peptide
  VARIANT (1)..(17): Xaa = Any Amino Acid
ACXXXELXCANPACTGC

SEQ ID NO: 6249 - protein, 17 aa, Artificial Sequence
  Synthetically generated peptide
  VARIANT (1)..(17): Xaa = Any Amino Acid
ACXXXELCAXNPACTGC

SEQ ID NO: 6250 - protein, 17 aa, Artificial Sequence
  Synthetically generated peptide
  VARIANT (1)..(17): Xaa = Any Amino Acid
ACXXXELCANXPACTGC

SEQ ID NO: 6251 - protein, 17 aa, Artificial Sequence
  Synthetically generated peptide
  VARIANT (1)..(17): Xaa = Any Amino Acid
ACXXXELCANPXACTGC

SEQ ID NO: 6252 - protein, 17 aa, Artificial Sequence
  Synthetically generated peptide
  VARIANT (1)..(17): Xaa = Any Amino Acid
ACXXXELCANPAXCTGC

SEQ ID NO: 6253 - protein, 17 aa, Artificial Sequence
  Synthetically generated peptide
  VARIANT (1)..(17): Xaa = Any Amino Acid
ACXXXELCANPACXTGC

SEQ ID NO: 6254 - protein, 17 aa, Artificial Sequence
  Synthetically generated peptide
  VARIANT (1)..(17): Xaa = Any Amino Acid
ACXXXELCANPACTXGC

SEQ ID NO: 6255 - protein, 17 aa, Artificial Sequence
  Synthetically generated peptide
  VARIANT (1)..(17): Xaa = Any Amino Acid
ACXXXELCANPACTGXC

SEQ ID NO: 6256 - protein, 16 aa, Artificial Sequence
  Synthetically generated peptide
  VARIANT (1)..(16): Xaa = Any Amino Acid
ACXXEXLCANPACTGC

SEQ ID NO: 6257 - protein, 17 aa, Artificial Sequence
  Synthetically generated peptide
  VARIANT (1)..(17): Xaa = Any Amino Acid
ACXXEXXLCANPACTGC

SEQ ID NO: 6258 - protein, 17 aa, Artificial Sequence
  Synthetically generated peptide
  VARIANT (1)..(17): Xaa = Any Amino Acid
ACXXEXLXCANPACTGC

SEQ ID NO: 6259 - protein, 17 aa, Artificial Sequence
  Synthetically generated peptide
  VARIANT (1)..(17): Xaa = Any Amino Acid
ACXXEXLCAXNPACTGC

SEQ ID NO: 6260 - protein, 17 aa, Artificial Sequence
  Synthetically generated peptide
  VARIANT (1)..(17): Xaa = Any Amino Acid
ACXXEXLCANXPACTGC

SEQ ID NO: 6261 - protein, 17 aa, Artificial Sequence
  Synthetically generated peptide
  VARIANT (1)..(17): Xaa = Any Amino Acid
ACXXEXLCANPXACTGC

SEQ ID NO: 6262 - protein, 17 aa, Artificial Sequence
  Synthetically generated peptide
  VARIANT (1)..(17): Xaa = Any Amino Acid
ACXXEXLCANPAXCTGC

SEQ ID NO: 6263 - protein, 17 aa, Artificial Sequence
  Synthetically generated peptide
  VARIANT (1)..(17): Xaa = Any Amino Acid
ACXXEXLCANPACXTGC

SEQ ID NO: 6264 - protein, 17 aa, Artificial Sequence
  Synthetically generated peptide
  VARIANT (1)..(17): Xaa = Any Amino Acid
ACXXEXLCANPACTXGC

SEQ ID NO: 6265 - protein, 17 aa, Artificial Sequence
  Synthetically generated peptide
  VARIANT (1)..(17): Xaa = Any Amino Acid
ACXXEXLCANPACTGXC

SEQ ID NO: 6266 - protein, 16 aa, Artificial Sequence
  Synthetically generated peptide
  VARIANT (1)..(16): Xaa = Any Amino Acid
ACXXELXCANPACTGC

SEQ ID NO: 6267 - protein, 17 aa, Artificial Sequence
  Synthetically generated peptide
  VARIANT (1)..(17): Xaa = Any Amino Acid
ACXXELXXCANPACTGC

SEQ ID NO: 6268 - protein, 17 aa, Artificial Sequence
  Synthetically generated peptide
  VARIANT (1)..(17): Xaa = Any Amino Acid
ACXXELXCAXNPACTGC

SEQ ID NO: 6269 - protein, 17 aa, Artificial Sequence
  Synthetically generated peptide
  VARIANT (1)..(17): Xaa = Any Amino Acid
ACXXELXCANXPACTGC

SEQ ID NO: 6270 - protein, 17 aa, Artificial Sequence
  Synthetically generated peptide
  VARIANT (1)..(17): Xaa = Any Amino Acid
ACXXELXCANPXACTGC

SEQ ID NO: 6271 - protein, 17 aa, Artificial Sequence
  Synthetically generated peptide
  VARIANT (1)..(17): Xaa = Any Amino Acid
ACXXELXCANPAXCTGC

SEQ ID NO: 6272 - protein, 17 aa, Artificial Sequence
  Synthetically generated peptide
  VARIANT (1)..(17): Xaa = Any Amino Acid
ACXXELXCANPACXTGC

SEQ ID NO: 6273 - protein, 17 aa, Artificial Sequence
  Synthetically generated peptide
  VARIANT (1)..(17): Xaa = Any Amino Acid
ACXXELXCANPACTXGC

SEQ ID NO: 6274 - protein, 17 aa, Artificial Sequence
  Synthetically generated peptide
  VARIANT (1)..(17): Xaa = Any Amino Acid
ACXXELXCANPACTGXC

SEQ ID NO: 6275 - protein, 16 aa, Artificial Sequence
  Synthetically generated peptide
  VARIANT (1)..(16): Xaa = Any Amino Acid
ACXXELCAXNPACTGC

SEQ ID NO: 6276 - protein, 17 aa, Artificial Sequence
  Synthetically generated peptide
  VARIANT (1)..(17): Xaa = Any Amino Acid
ACXXELCAXXNPACTGC

SEQ ID NO: 6277 - protein, 17 aa, Artificial Sequence
  Synthetically generated peptide
  VARIANT (1)..(17): Xaa = Any Amino Acid
ACXXELCAXNXPACTGC

SEQ ID NO: 6278 - protein, 17 aa, Artificial Sequence
  Synthetically generated peptide
  VARIANT (1)..(17): Xaa = Any Amino Acid
ACXXELCAXNPXACTGC

SEQ ID NO: 6279 - protein, 17 aa, Artificial Sequence
  Synthetically generated peptide
  VARIANT (1)..(17): Xaa = Any Amino Acid
ACXXELCAXNPAXCTGC

SEQ ID NO: 6280 - protein, 17 aa, Artificial Sequence
  Synthetically generated peptide
  VARIANT (1)..(17): Xaa = Any Amino Acid
ACXXELCAXNPACXTGC

SEQ ID NO: 6281 - protein, 17 aa, Artificial Sequence
  Synthetically generated peptide
  VARIANT (1)..(17): Xaa = Any Amino Acid
ACXXELCAXNPACTXGC

SEQ ID NO: 6282 - protein, 17 aa, Artificial Sequence
  Synthetically generated peptide
  VARIANT (1)..(17): Xaa = Any Amino Acid
ACXXELCAXNPACTGXC

SEQ ID NO: 6283 - protein, 16 aa, Artificial Sequence
  Synthetically generated peptide
  VARIANT (1)..(16): Xaa = Any Amino Acid
ACXXELCANXPACTGC

SEQ ID NO: 6284 - protein, 17 aa, Artificial Sequence
  Synthetically generated peptide
  VARIANT (1)..(17): Xaa = Any Amino Acid
ACXXELCANXXPACTGC

SEQ ID NO: 6285 - protein, 17 aa, Artificial Sequence
  Synthetically generated peptide
  VARIANT (1)..(17): Xaa = Any Amino Acid
ACXXELCANXPXACTGC

SEQ ID NO: 6286 - protein, 17 aa, Artificial Sequence
  Synthetically generated peptide
  VARIANT (1)..(17): Xaa = Any Amino Acid
ACXXELCANXPAXCTGC

SEQ ID NO: 6287 - protein, 17 aa, Artificial Sequence
  Synthetically generated peptide
  VARIANT (1)..(17): Xaa = Any Amino Acid
ACXXELCANXPACXTGC

SEQ ID NO: 6288 - protein, 17 aa, Artificial Sequence
  Synthetically generated peptide
  VARIANT (1)..(17): Xaa = Any Amino Acid
ACXXELCANXPACTXGC

SEQ ID NO: 6289 - protein, 17 aa, Artificial Sequence
  Synthetically generated peptide
  VARIANT (1)..(17): Xaa = Any Amino Acid
ACXXELCANXPACTGXC

SEQ ID NO: 6290 - protein, 16 aa, Artificial Sequence
  Synthetically generated peptide
  VARIANT (1)..(16): Xaa = Any Amino Acid
ACXXELCANPXACTGC

SEQ ID NO: 6291 - protein, 17 aa, Artificial Sequence
  Synthetically generated peptide
  VARIANT (1)..(17): Xaa = Any Amino Acid
ACXXELCANPXXACTGC

SEQ ID NO: 6292 - protein, 17 aa, Artificial Sequence
  Synthetically generated peptide
  VARIANT (1)..(17): Xaa = Any Amino Acid
ACXXELCANPXAXCTGC

SEQ ID NO: 6293 - protein, 17 aa, Artificial Sequence
  Synthetically generated peptide
  VARIANT (1)..(17): Xaa = Any Amino Acid
ACXXELCANPXACXTGC

SEQ ID NO: 6294 - protein, 17 aa, Artificial Sequence
  Synthetically generated peptide
  VARIANT (1)..(17): Xaa = Any Amino Acid
ACXXELCANPXACTXGC

SEQ ID NO: 6295 - protein, 17 aa, Artificial Sequence
  Synthetically generated peptide
  VARIANT (1)..(17): Xaa = Any Amino Acid
ACXXELCANPXACTGXC

SEQ ID NO: 6296 - protein, 16 aa, Artificial Sequence
  Synthetically generated peptide
  VARIANT (1)..(16): Xaa = Any Amino Acid
ACXXELCANPAXCTGC

SEQ ID NO: 6297 - protein, 17 aa, Artificial Sequence
  Synthetically generated peptide
  VARIANT (1)..(17): Xaa = Any Amino Acid
ACXXELCANPAXXCTGC

SEQ ID NO: 6298 - protein, 17 aa, Artificial Sequence
  Synthetically generated peptide
  VARIANT (1)..(17): Xaa = Any Amino Acid
ACXXELCANPAXCXTGC

SEQ ID NO: 6299 - protein, 17 aa, Artificial Sequence
  Synthetically generated peptide
  VARIANT (1)..(17): Xaa = Any Amino Acid
ACXXELCANPAXCTXGC

SEQ ID NO: 6300 - protein, 17 aa, Artificial Sequence
  Synthetically generated peptide
  VARIANT (1)..(17): Xaa = Any Amino Acid
ACXXELCANPAXCTGXC

SEQ ID NO: 6301 - protein, 16 aa, Artificial Sequence
  Synthetically generated peptide
  VARIANT (1)..(16): Xaa = Any Amino Acid
ACXXELCANPACXTGC

SEQ ID NO: 6302 - protein, 17 aa, Artificial Sequence
  Synthetically generated peptide
  VARIANT (1)..(17): Xaa = Any Amino Acid
ACXXELCANPACXXTGC

SEQ ID NO: 6303 - protein, 17 aa, Artificial Sequence
  Synthetically generated peptide
  VARIANT (1)..(17): Xaa = Any Amino Acid
ACXXELCANPACXTXGC

SEQ ID NO: 6304 - protein, 17 aa, Artificial Sequence
  Synthetically generated peptide
  VARIANT (1)..(17): Xaa = Any Amino Acid
ACXXELCANPACXTGXC

SEQ ID NO: 6305 - protein, 16 aa, Artificial Sequence
  Synthetically generated peptide
  VARIANT (1)..(16): Xaa = Any Amino Acid
ACXXELCANPACTXGC

SEQ ID NO: 6306 - protein, 17 aa, Artificial Sequence
  Synthetically generated peptide
  VARIANT (1)..(17): Xaa = Any Amino Acid
ACXXELCANPACTXXGC

SEQ ID NO: 6307 - protein, 17 aa, Artificial Sequence
  Synthetically generated peptide
  VARIANT (1)..(17): Xaa = Any Amino Acid
ACXXELCANPACTXGXC

SEQ ID NO: 6308 - protein, 16 aa, Artificial Sequence
  Synthetically generated peptide
  VARIANT (1)..(16): Xaa = Any Amino Acid
ACXXELCANPACTGXC

SEQ ID NO: 6309 - protein, 17 aa, Artificial Sequence
  Synthetically generated peptide
  VARIANT (1)..(17): Xaa = Any Amino Acid
ACXXELCANPACTGXXC

SEQ ID NO: 6310 - protein, 15 aa, Artificial Sequence
  Synthetically generated peptide
  VARIANT (1)..(15): Xaa = Any Amino Acid
ACXEXLCANPACTGC

SEQ ID NO: 6311 - protein, 16 aa, Artificial Sequence
  Synthetically generated peptide
  VARIANT (1)..(16): Xaa = Any Amino Acid
ACXEXXLCANPACTGC

SEQ ID NO: 6312 - protein, 17 aa, Artificial Sequence
  Synthetically generated peptide
  VARIANT (1)..(17): Xaa = Any Amino Acid
ACXEXXXLCANPACTGC

SEQ ID NO: 6313 - protein, 17 aa, Artificial Sequence
  Synthetically generated peptide
  VARIANT (1)..(17): Xaa = Any Amino Acid
ACXEXXLXCANPACTGC

SEQ ID NO: 6314 - protein, 17 aa, Artificial Sequence
  Synthetically generated peptide
  VARIANT (1)..(17): Xaa = Any Amino Acid
ACXEXXLCAXNPACTGC

SEQ ID NO: 6315 - protein, 17 aa, Artificial Sequence
  Synthetically generated peptide
  VARIANT (1)..(17): Xaa = Any Amino Acid
ACXEXXLCANXPACTGC

SEQ ID NO: 6316 - protein, 17 aa, Artificial Sequence
  Synthetically generated peptide
  VARIANT (1)..(17): Xaa = Any Amino Acid
ACXEXXLCANPXACTGC

SEQ ID NO: 6317 - protein, 17 aa, Artificial Sequence
  Synthetically generated peptide
  VARIANT (1)..(17): Xaa = Any Amino Acid
ACXEXXLCANPAXCTGC

SEQ ID NO: 6318 - protein, 17 aa, Artificial Sequence
  Synthetically generated peptide
  VARIANT (1)..(17): Xaa = Any Amino Acid
ACXEXXLCANPACXTGC

SEQ ID NO: 6319 - protein, 17 aa, Artificial Sequence
  Synthetically generated peptide
  VARIANT (1)..(17): Xaa = Any Amino Acid
ACXEXXLCANPACTXGC

SEQ ID NO: 6320 - protein, 17 aa, Artificial Sequence
  Synthetically generated peptide
  VARIANT (1)..(17): Xaa = Any Amino Acid
ACXEXXLCANPACTGXC

SEQ ID NO: 6321 - protein, 16 aa, Artificial Sequence
  Synthetically generated peptide
  VARIANT (1)..(16): Xaa = Any Amino Acid
ACXEXLXCANPACTGC

SEQ ID NO: 6322 - protein, 17 aa, Artificial Sequence
  Synthetically generated peptide
  VARIANT (1)..(17): Xaa = Any Amino Acid
ACXEXLXXCANPACTGC

SEQ ID NO: 6323 - protein, 17 aa, Artificial Sequence
  Synthetically generated peptide
  VARIANT (1)..(17): Xaa = Any Amino Acid
ACXEXLXCAXNPACTGC

SEQ ID NO: 6324 - protein, 17 aa, Artificial Sequence
  Synthetically generated peptide
  VARIANT (1)..(17): Xaa = Any Amino Acid
ACXEXLXCANXPACTGC

SEQ ID NO: 6325 - protein, 17 aa, Artificial Sequence
  Synthetically generated peptide
  VARIANT (1)..(17): Xaa = Any Amino Acid
ACXEXLXCANPXACTGC

SEQ ID NO: 6326 - protein, 17 aa, Artificial Sequence
  Synthetically generated peptide
  VARIANT (1)..(17): Xaa = Any Amino Acid
ACXEXLXCANPAXCTGC

SEQ ID NO: 6327 - protein, 17 aa, Artificial Sequence
  Synthetically generated peptide
  VARIANT (1)..(17): Xaa = Any Amino Acid
ACXEXLXCANPACXTGC

SEQ ID NO: 6328 - protein, 17 aa, Artificial Sequence
  Synthetically generated peptide
  VARIANT (1)..(17): Xaa = Any Amino Acid
ACXEXLXCANPACTXGC

SEQ ID NO: 6329 - protein, 17 aa, Artificial Sequence
  Synthetically generated peptide
  VARIANT (1)..(17): Xaa = Any Amino Acid
ACXEXLXCANPACTGXC

SEQ ID NO: 6330 - protein, 16 aa, Artificial Sequence
  Synthetically generated peptide
  VARIANT (1)..(16): Xaa = Any Amino Acid
ACXEXLCAXNPACTGC

SEQ ID NO: 6331 - protein, 17 aa, Artificial Sequence
  Synthetically generated peptide
  VARIANT (1)..(17): Xaa = Any Amino Acid
ACXEXLCAXXNPACTGC

SEQ ID NO: 6332 - protein, 17 aa, Artificial Sequence
  Synthetically generated peptide
  VARIANT (1)..(17): Xaa = Any Amino Acid
ACXEXLCAXNXPACTGC

SEQ ID NO: 6333 - protein, 17 aa, Artificial Sequence
  Synthetically generated peptide
  VARIANT (1)..(17): Xaa = Any Amino Acid
ACXEXLCAXNPXACTGC

SEQ ID NO: 6334 - protein, 17 aa, Artificial Sequence
  Synthetically generated peptide
  VARIANT (1)..(17): Xaa = Any Amino Acid
ACXEXLCAXNPAXCTGC

SEQ ID NO: 6335 - protein, 17 aa, Artificial Sequence
  Synthetically generated peptide
  VARIANT (1)..(17): Xaa = Any Amino Acid
ACXEXLCAXNPACXTGC

SEQ ID NO: 6336 - protein, 17 aa, Artificial Sequence
  Synthetically generated peptide
  VARIANT (1)..(17): Xaa = Any Amino Acid
ACXEXLCAXNPACTXGC

SEQ ID NO: 6337 - protein, 17 aa, Artificial Sequence
  Synthetically generated peptide
  VARIANT (1)..(17): Xaa = Any Amino Acid
ACXEXLCAXNPACTGXC

SEQ ID NO: 6338 - protein, 16 aa, Artificial Sequence
  Synthetically generated peptide
  VARIANT (1)..(16): Xaa = Any Amino Acid
ACXEXLCANXPACTGC

SEQ ID NO: 6339 - protein, 17 aa, Artificial Sequence
  Synthetically generated peptide
  VARIANT (1)..(17): Xaa = Any Amino Acid
ACXEXLCANXXPACTGC

SEQ ID NO: 6340 - protein, 17 aa, Artificial Sequence
  Synthetically generated peptide
  VARIANT (1)..(17): Xaa = Any Amino Acid
ACXEXLCANXPXACTGC

SEQ ID NO: 6341 - protein, 17 aa, Artificial Sequence
  Synthetically generated peptide
  VARIANT (1)..(17): Xaa = Any Amino Acid
ACXEXLCANXPAXCTGC

SEQ ID NO: 6342 - protein, 17 aa, Artificial Sequence
  Synthetically generated peptide
  VARIANT (1)..(17): Xaa = Any Amino Acid
ACXEXLCANXPACXTGC

SEQ ID NO: 6343 - protein, 17 aa, Artificial Sequence
  Synthetically generated peptide
  VARIANT (1)..(17): Xaa = Any Amino Acid
ACXEXLCANXPACTXGC

SEQ ID NO: 6344 - protein, 17 aa, Artificial Sequence
  Synthetically generated peptide
  VARIANT (1)..(17): Xaa = Any Amino Acid
ACXEXLCANXPACTGXC

SEQ ID NO: 6345 - protein, 16 aa, Artificial Sequence
  Synthetically generated peptide
  VARIANT (1)..(16): Xaa = Any Amino Acid
ACXEXLCANPXACTGC

SEQ ID NO: 6346 - protein, 17 aa, Artificial Sequence
  Synthetically generated peptide
  VARIANT (1)..(17): Xaa = Any Amino Acid
ACXEXLCANPXXACTGC

SEQ ID NO: 6347 - protein, 17 aa, Artificial Sequence
  Synthetically generated peptide
  VARIANT (1)..(17): Xaa = Any Amino Acid
ACXEXLCANPXAXCTGC

SEQ ID NO: 6348 - protein, 17 aa, Artificial Sequence
  Synthetically generated peptide
  VARIANT (1)..(17): Xaa = Any Amino Acid
ACXEXLCANPXACXTGC

SEQ ID NO: 6349 - protein, 17 aa, Artificial Sequence
  Synthetically generated peptide
  VARIANT (1)..(17): Xaa = Any Amino Acid
ACXEXLCANPXACTXGC

SEQ ID NO: 6350 - protein, 17 aa, Artificial Sequence
  Synthetically generated peptide
  VARIANT (1)..(17): Xaa = Any Amino Acid
ACXEXLCANPXACTGXC

SEQ ID NO: 6351 - protein, 16 aa, Artificial Sequence
  Synthetically generated peptide
  VARIANT (1)..(16): Xaa = Any Amino Acid
ACXEXLCANPAXCTGC

SEQ ID NO: 6352 - protein, 17 aa, Artificial Sequence
  Synthetically generated peptide
  VARIANT (1)..(17): Xaa = Any Amino Acid
ACXEXLCANPAXXCTGC

SEQ ID NO: 6353 - protein, 17 aa, Artificial Sequence
  Synthetically generated peptide
  VARIANT (1)..(17): Xaa = Any Amino Acid
ACXEXLCANPAXCXTGC

SEQ ID NO: 6354 - protein, 17 aa, Artificial Sequence
  Synthetically generated peptide
  VARIANT (1)..(17): Xaa = Any Amino Acid
ACXEXLCANPAXCTXGC

SEQ ID NO: 6355 - protein, 17 aa, Artificial Sequence
  Synthetically generated peptide
  VARIANT (1)..(17): Xaa = Any Amino Acid
ACXEXLCANPAXCTGXC

SEQ ID NO: 6356 - protein, 16 aa, Artificial Sequence
  Synthetically generated peptide
  VARIANT (1)..(16): Xaa = Any Amino Acid
ACXEXLCANPACXTGC

SEQ ID NO: 6357 - protein, 17 aa, Artificial Sequence
  Synthetically generated peptide
  VARIANT (1)..(17): Xaa = Any Amino Acid
ACXEXLCANPACXXTGC

SEQ ID NO: 6358 - protein, 17 aa, Artificial Sequence
  Synthetically generated peptide
  VARIANT (1)..(17): Xaa = Any Amino Acid
ACXEXLCANPACXTXGC

SEQ ID NO: 6359 - protein, 17 aa, Artificial Sequence
  Synthetically generated peptide
  VARIANT (1)..(17): Xaa = Any Amino Acid
ACXEXLCANPACXTGXC

SEQ ID NO: 6360 - protein, 16 aa, Artificial Sequence
  Synthetically generated peptide
  VARIANT (1)..(16): Xaa = Any Amino Acid
ACXEXLCANPACTXGC

SEQ ID NO: 6361 - protein, 17 aa, Artificial Sequence
  Synthetically generated peptide
  VARIANT (1)..(17): Xaa = Any Amino Acid
ACXEXLCANPACTXXGC

SEQ ID NO: 6362 - protein, 17 aa, Artificial Sequence
  Synthetically generated peptide
  VARIANT (1)..(17): Xaa = Any Amino Acid
ACXEXLCANPACTXGXC

SEQ ID NO: 6363 - protein, 16 aa, Artificial Sequence
  Synthetically generated peptide
  VARIANT (1)..(16): Xaa = Any Amino Acid
ACXEXLCANPACTGXC

SEQ ID NO: 6364 - protein, 17 aa, Artificial Sequence
  Synthetically generated peptide
  VARIANT (1)..(17): Xaa = Any Amino Acid
ACXEXLCANPACTGXXC

SEQ ID NO: 6365 - protein, 15 aa, Artificial Sequence
  Synthetically generated peptide
  VARIANT (1)..(15): Xaa = Any Amino Acid
ACXELXCANPACTGC

SEQ ID NO: 6366 - protein, 16 aa, Artificial Sequence
  Synthetically generated peptide
  VARIANT (1)..(16): Xaa = Any Amino Acid
ACXELXXCANPACTGC

SEQ ID NO: 6367 - protein, 17 aa, Artificial Sequence
  Synthetically generated peptide
  VARIANT (1)..(17): Xaa = Any Amino Acid
ACXELXXXCANPACTGC

SEQ ID NO: 6368 - protein, 17 aa, Artificial Sequence
  Synthetically generated peptide
  VARIANT (1)..(17): Xaa = Any Amino Acid
ACXELXXCAXNPACTGC

SEQ ID NO: 6369 - protein, 17 aa, Artificial Sequence
  Synthetically generated peptide
  VARIANT (1)..(17): Xaa = Any Amino Acid
ACXELXXCANXPACTGC

SEQ ID NO: 6370 - protein, 17 aa, Artificial Sequence
  Synthetically generated peptide
  VARIANT (1)..(17): Xaa = Any Amino Acid
ACXELXXCANPXACTGC

SEQ ID NO: 6371 - protein, 17 aa, Artificial Sequence
  Synthetically generated peptide
  VARIANT (1)..(17): Xaa = Any Amino Acid
ACXELXXCANPAXCTGC

SEQ ID NO: 6372 - protein, 17 aa, Artificial Sequence
  Synthetically generated peptide
  VARIANT (1)..(17): Xaa = Any Amino Acid
ACXELXXCANPACXTGC

SEQ ID NO: 6373 - protein, 17 aa, Artificial Sequence
  Synthetically generated peptide
  VARIANT (1)..(17): Xaa = Any Amino Acid
ACXELXXCANPACTXGC

SEQ ID NO: 6374 - protein, 17 aa, Artificial Sequence
  Synthetically generated peptide
  VARIANT (1)..(17): Xaa = Any Amino Acid
ACXELXXCANPACTGXC

SEQ ID NO: 6375 - protein, 16 aa, Artificial Sequence
  Synthetically generated peptide
  VARIANT (1)..(16): Xaa = Any Amino Acid
ACXELXCAXNPACTGC

SEQ ID NO: 6376 - protein, 17 aa, Artificial Sequence
  Synthetically generated peptide
  VARIANT (1)..(17): Xaa = Any Amino Acid
ACXELXCAXXNPACTGC

SEQ ID NO: 6377 - protein, 17 aa, Artificial Sequence
  Synthetically generated peptide
  VARIANT (1)..(17): Xaa = Any Amino Acid
ACXELXCAXNXPACTGC

SEQ ID NO: 6378 - protein, 17 aa, Artificial Sequence
  Synthetically generated peptide
  VARIANT (1)..(17): Xaa = Any Amino Acid
ACXELXCAXNPXACTGC

SEQ ID NO: 6379 - protein, 17 aa, Artificial Sequence
  Synthetically generated peptide
  VARIANT (1)..(17): Xaa = Any Amino Acid
ACXELXCAXNPAXCTGC

SEQ ID NO: 6380 - protein, 17 aa, Artificial Sequence
  Synthetically generated peptide
  VARIANT (1)..(17): Xaa = Any Amino Acid
ACXELXCAXNPACXTGC

SEQ ID NO: 6381 - protein, 17 aa, Artificial Sequence
  Synthetically generated peptide
  VARIANT (1)..(17): Xaa = Any Amino Acid
ACXELXCAXNPACTXGC

SEQ ID NO: 6382 - protein, 17 aa, Artificial Sequence
  Synthetically generated peptide
  VARIANT (1)..(17): Xaa = Any Amino Acid
ACXELXCAXNPACTGXC

SEQ ID NO: 6383 - protein, 16 aa, Artificial Sequence
  Synthetically generated peptide
  VARIANT (1)..(16): Xaa = Any Amino Acid
ACXELXCANXPACTGC

SEQ ID NO: 6384 - protein, 17 aa, Artificial Sequence
  Synthetically generated peptide
  VARIANT (1)..(17): Xaa = Any Amino Acid
ACXELXCANXXPACTGC

SEQ ID NO: 6385 - protein, 17 aa, Artificial Sequence
  Synthetically generated peptide
  VARIANT (1)..(17): Xaa = Any Amino Acid
ACXELXCANXPXACTGC

SEQ ID NO: 6386 - protein, 17 aa, Artificial Sequence
  Synthetically generated peptide
  VARIANT (1)..(17): Xaa = Any Amino Acid
ACXELXCANXPAXCTGC

SEQ ID NO: 6387 - protein, 17 aa, Artificial Sequence
  Synthetically generated peptide
  VARIANT (1)..(17): Xaa = Any Amino Acid
ACXELXCANXPACXTGC

SEQ ID NO: 6388 - protein, 17 aa, Artificial Sequence
  Synthetically generated peptide
  VARIANT (1)..(17): Xaa = Any Amino Acid
ACXELXCANXPACTXGC

SEQ ID NO: 6389 - protein, 17 aa, Artificial Sequence
  Synthetically generated peptide
  VARIANT (1)..(17): Xaa = Any Amino Acid
ACXELXCANXPACTGXC

SEQ ID NO: 6390 - protein, 16 aa, Artificial Sequence
  Synthetically generated peptide
  VARIANT (1)..(16): Xaa = Any Amino Acid
ACXELXCANPXACTGC

SEQ ID NO: 6391 - protein, 17 aa, Artificial Sequence
  Synthetically generated peptide
  VARIANT (1)..(17): Xaa = Any Amino Acid
ACXELXCANPXXACTGC

SEQ ID NO: 6392 - protein, 17 aa, Artificial Sequence
  Synthetically generated peptide
  VARIANT (1)..(17): Xaa = Any Amino Acid
ACXELXCANPXAXCTGC

SEQ ID NO: 6393 - protein, 17 aa, Artificial Sequence
  Synthetically generated peptide
  VARIANT (1)..(17): Xaa = Any Amino Acid
ACXELXCANPXACXTGC

SEQ ID NO: 6394 - protein, 17 aa, Artificial Sequence
  Synthetically generated peptide
  VARIANT (1)..(17): Xaa = Any Amino Acid
ACXELXCANPXACTXGC

SEQ ID NO: 6395 - protein, 17 aa, Artificial Sequence
  Synthetically generated peptide
  VARIANT (1)..(17): Xaa = Any Amino Acid
ACXELXCANPXACTGXC

SEQ ID NO: 6396 - protein, 16 aa, Artificial Sequence
  Synthetically generated peptide
  VARIANT (1)..(16): Xaa = Any Amino Acid
ACXELXCANPAXCTGC

SEQ ID NO: 6397 - protein, 17 aa, Artificial Sequence
  Synthetically generated peptide
  VARIANT (1)..(17): Xaa = Any Amino Acid
ACXELXCANPAXXCTGC

SEQ ID NO: 6398 - protein, 17 aa, Artificial Sequence
  Synthetically generated peptide
  VARIANT (1)..(17): Xaa = Any Amino Acid
ACXELXCANPAXCXTGC

SEQ ID NO: 6399 - protein, 17 aa, Artificial Sequence
  Synthetically generated peptide
  VARIANT (1)..(17): Xaa = Any Amino Acid
ACXELXCANPAXCTXGC

SEQ ID NO: 6400 - protein, 17 aa, Artificial Sequence
  Synthetically generated peptide
  VARIANT (1)..(17): Xaa = Any Amino Acid
ACXELXCANPAXCTGXC

SEQ ID NO: 6401 - protein, 16 aa, Artificial Sequence
  Synthetically generated peptide
  VARIANT (1)..(16): Xaa = Any Amino Acid
ACXELXCANPACXTGC

SEQ ID NO: 6402 - protein, 17 aa, Artificial Sequence
  Synthetically generated peptide
  VARIANT (1)..(17): Xaa = Any Amino Acid
ACXELXCANPACXXTGC

SEQ ID NO: 6403 - protein, 17 aa, Artificial Sequence
  Synthetically generated peptide
  VARIANT (1)..(17): Xaa = Any Amino Acid
ACXELXCANPACXTXGC

SEQ ID NO: 6404 - protein, 17 aa, Artificial Sequence
  Synthetically generated peptide
  VARIANT (1)..(17): Xaa = Any Amino Acid
ACXELXCANPACXTGXC

SEQ ID NO: 6405 - protein, 16 aa, Artificial Sequence
  Synthetically generated peptide
  VARIANT (1)..(16): Xaa = Any Amino Acid
ACXELXCANPACTXGC

SEQ ID NO: 6406 - protein, 17 aa, Artificial Sequence
  Synthetically generated peptide
  VARIANT (1)..(17): Xaa = Any Amino Acid
ACXELXCANPACTXXGC

SEQ ID NO: 6407 - protein, 17 aa, Artificial Sequence
  Synthetically generated peptide
  VARIANT (1)..(17): Xaa = Any Amino Acid
ACXELXCANPACTXGXC

SEQ ID NO: 6408 - protein, 16 aa, Artificial Sequence
  Synthetically generated peptide
  VARIANT (1)..(16): Xaa = Any Amino Acid
ACXELXCANPACTGXC

SEQ ID NO: 6409 - protein, 17 aa, Artificial Sequence
  Synthetically generated peptide
  VARIANT (1)..(17): Xaa = Any Amino Acid
ACXELXCANPACTGXXC

SEQ ID NO: 6410 - protein, 15 aa, Artificial Sequence
  Synthetically generated peptide
  VARIANT (1)..(15): Xaa = Any Amino Acid
ACXELCAXNPACTGC

SEQ ID NO: 6411 - protein, 16 aa, Artificial Sequence
  Synthetically generated peptide
  VARIANT (1)..(16): Xaa = Any Amino Acid
ACXELCAXXNPACTGC

SEQ ID NO: 6412 - protein, 17 aa, Artificial Sequence
  Synthetically generated peptide
  VARIANT (1)..(17): Xaa = Any Amino Acid
ACXELCAXXXNPACTGC

SEQ ID NO: 6413 - protein, 17 aa, Artificial Sequence
  Synthetically generated peptide
  VARIANT (1)..(17): Xaa = Any Amino Acid
ACXELCAXXNXPACTGC

SEQ ID NO: 6414 - protein, 17 aa, Artificial Sequence
  Synthetically generated peptide
  VARIANT (1)..(17): Xaa = Any Amino Acid
ACXELCAXXNPXACTGC

SEQ ID NO: 6415 - protein, 17 aa, Artificial Sequence
  Synthetically generated peptide
  VARIANT (1)..(17): Xaa = Any Amino Acid
ACXELCAXXNPAXCTGC

SEQ ID NO: 6416 - protein, 17 aa, Artificial Sequence
  Synthetically generated peptide
  VARIANT (1)..(17): Xaa = Any Amino Acid
ACXELCAXXNPACXTGC

SEQ ID NO: 6417 - protein, 17 aa, Artificial Sequence
  Synthetically generated peptide
  VARIANT (1)..(17): Xaa = Any Amino Acid
ACXELCAXXNPACTXGC

SEQ ID NO: 6418 - protein, 17 aa, Artificial Sequence
  Synthetically generated peptide
  VARIANT (1)..(17): Xaa = Any Amino Acid
ACXELCAXXNPACTGXC

SEQ ID NO: 6419 - protein, 16 aa, Artificial Sequence
  Synthetically generated peptide
  VARIANT (1)..(16): Xaa = Any Amino Acid
ACXELCAXNXPACTGC

SEQ ID NO: 6420 - protein, 17 aa, Artificial Sequence
  Synthetically generated peptide
  VARIANT (1)..(17): Xaa = Any Amino Acid
ACXELCAXNXXPACTGC

SEQ ID NO: 6421 - protein, 17 aa, Artificial Sequence
  Synthetically generated peptide
  VARIANT (1)..(17): Xaa = Any Amino Acid
ACXELCAXNXPXACTGC

SEQ ID NO: 6422 - protein, 17 aa, Artificial Sequence
  Synthetically generated peptide
  VARIANT (1)..(17): Xaa = Any Amino Acid
ACXELCAXNXPAXCTGC

SEQ ID NO: 6423 - protein, 17 aa, Artificial Sequence
  Synthetically generated peptide
  VARIANT (1)..(17): Xaa = Any Amino Acid
ACXELCAXNXPACXTGC

SEQ ID NO: 6424 - protein, 17 aa, Artificial Sequence
  Synthetically generated peptide
  VARIANT (1)..(17): Xaa = Any Amino Acid
ACXELCAXNXPACTXGC

SEQ ID NO: 6425 - protein, 17 aa, Artificial Sequence
  Synthetically generated peptide
  VARIANT (1)..(17): Xaa = Any Amino Acid
ACXELCAXNXPACTGXC

SEQ ID NO: 6426 - protein, 16 aa, Artificial Sequence
  Synthetically generated peptide
  VARIANT (1)..(16): Xaa = Any Amino Acid
ACXELCAXNPXACTGC

SEQ ID NO: 6427 - protein, 17 aa, Artificial Sequence
  Synthetically generated peptide
  VARIANT (1)..(17): Xaa = Any Amino Acid
ACXELCAXNPXXACTGC

SEQ ID NO: 6428 - protein, 17 aa, Artificial Sequence
  Synthetically generated peptide
  VARIANT (1)..(17): Xaa = Any Amino Acid
ACXELCAXNPXAXCTGC

SEQ ID NO: 6429 - protein, 17 aa, Artificial Sequence
  Synthetically generated peptide
  VARIANT (1)..(17): Xaa = Any Amino Acid
ACXELCAXNPXACXTGC

SEQ ID NO: 6430 - protein, 17 aa, Artificial Sequence
  Synthetically generated peptide
  VARIANT (1)..(17): Xaa = Any Amino Acid
ACXELCAXNPXACTXGC

SEQ ID NO: 6431 - protein, 17 aa, Artificial Sequence
  Synthetically generated peptide
  VARIANT (1)..(17): Xaa = Any Amino Acid
ACXELCAXNPXACTGXC

SEQ ID NO: 6432 - protein, 16 aa, Artificial Sequence
  Synthetically generated peptide
  VARIANT (1)..(16): Xaa = Any Amino Acid
ACXELCAXNPAXCTGC

SEQ ID NO: 6433 - protein, 17 aa, Artificial Sequence
  Synthetically generated peptide
  VARIANT (1)..(17): Xaa = Any Amino Acid
ACXELCAXNPAXXCTGC

SEQ ID NO: 6434 - protein, 17 aa, Artificial Sequence
  Synthetically generated peptide
  VARIANT (1)..(17): Xaa = Any Amino Acid
ACXELCAXNPAXCXTGC

SEQ ID NO: 6435 - protein, 17 aa, Artificial Sequence
  Synthetically generated peptide
  VARIANT (1)..(17): Xaa = Any Amino Acid
ACXELCAXNPAXCTXGC

SEQ ID NO: 6436 - protein, 17 aa, Artificial Sequence
  Synthetically generated peptide
  VARIANT (1)..(17): Xaa = Any Amino Acid
ACXELCAXNPAXCTGXC

SEQ ID NO: 6437 - protein, 16 aa, Artificial Sequence
  Synthetically generated peptide
  VARIANT (1)..(16): Xaa = Any Amino Acid
ACXELCAXNPACXTGC

SEQ ID NO: 6438 - protein, 17 aa, Artificial Sequence
  Synthetically generated peptide
  VARIANT (1)..(17): Xaa = Any Amino Acid
ACXELCAXNPACXXTGC

SEQ ID NO: 6439 - protein, 17 aa, Artificial Sequence
  Synthetically generated peptide
  VARIANT (1)..(17): Xaa = Any Amino Acid
ACXELCAXNPACXTXGC

SEQ ID NO: 6440 - protein, 17 aa, Artificial Sequence
  Synthetically generated peptide
  VARIANT (1)..(17): Xaa = Any Amino Acid
ACXELCAXNPACXTGXC

SEQ ID NO: 6441 - protein, 16 aa, Artificial Sequence
  Synthetically generated peptide
  VARIANT (1)..(16): Xaa = Any Amino Acid
ACXELCAXNPACTXGC

SEQ ID NO: 6442 - protein, 17 aa, Artificial Sequence
  Synthetically generated peptide
  VARIANT (1)..(17): Xaa = Any Amino Acid
ACXELCAXNPACTXXGC

SEQ ID NO: 6443 - protein, 17 aa, Artificial Sequence
  Synthetically generated peptide
  VARIANT (1)..(17): Xaa = Any Amino Acid
ACXELCAXNPACTXGXC

SEQ ID NO: 6444 - protein, 16 aa, Artificial Sequence
  Synthetically generated peptide
  VARIANT (1)..(16): Xaa = Any Amino Acid
ACXELCAXNPACTGXC

SEQ ID NO: 6445 - protein, 17 aa, Artificial Sequence
  Synthetically generated peptide
  VARIANT (1)..(17): Xaa = Any Amino Acid
ACXELCAXNPACTGXXC

SEQ ID NO: 6446 - protein, 15 aa, Artificial Sequence
  Synthetically generated peptide
  VARIANT (1)..(15): Xaa = Any Amino Acid
ACXELCANXPACTGC

SEQ ID NO: 6447 - protein, 16 aa, Artificial Sequence
  Synthetically generated peptide
  VARIANT (1)..(16): Xaa = Any Amino Acid
ACXELCANXXPACTGC

SEQ ID NO: 6448 - protein, 17 aa, Artificial Sequence
  Synthetically generated peptide
  VARIANT (1)..(17): Xaa = Any Amino Acid
ACXELCANXXXPACTGC

SEQ ID NO: 6449 - protein, 17 aa, Artificial Sequence
  Synthetically generated peptide
  VARIANT (1)..(17): Xaa = Any Amino Acid
ACXELCANXXPXACTGC

SEQ ID NO: 6450 - protein, 17 aa, Artificial Sequence
  Synthetically generated peptide
  VARIANT (1)..(17): Xaa = Any Amino Acid
ACXELCANXXPAXCTGC

SEQ ID NO: 6451 - protein, 17 aa, Artificial Sequence
  Synthetically generated peptide
  VARIANT (1)..(17): Xaa = Any Amino Acid
ACXELCANXXPACXTGC

SEQ ID NO: 6452 - protein, 17 aa, Artificial Sequence
  Synthetically generated peptide
  VARIANT (1)..(17): Xaa = Any Amino Acid
ACXELCANXXPACTXGC

SEQ ID NO: 6453 - protein, 17 aa, Artificial Sequence
  Synthetically generated peptide
  VARIANT (1)..(17): Xaa = Any Amino Acid
ACXELCANXXPACTGXC

SEQ ID NO: 6454 - protein, 16 aa, Artificial Sequence
  Synthetically generated peptide
  VARIANT (1)..(16): Xaa = Any Amino Acid
ACXELCANXPXACTGC

SEQ ID NO: 6455 - protein, 17 aa, Artificial Sequence
  Synthetically generated peptide
  VARIANT (1)..(17): Xaa = Any Amino Acid
ACXELCANXPXXACTGC

SEQ ID NO: 6456 - protein, 17 aa, Artificial Sequence
  Synthetically generated peptide
  VARIANT (1)..(17): Xaa = Any Amino Acid
ACXELCANXPXAXCTGC

SEQ ID NO: 6457 - protein, 17 aa, Artificial Sequence
  Synthetically generated peptide
  VARIANT (1)..(17): Xaa = Any Amino Acid
ACXELCANXPXACXTGC

SEQ ID NO: 6458 - protein, 17 aa, Artificial Sequence
  Synthetically generated peptide
  VARIANT (1)..(17): Xaa = Any Amino Acid
ACXELCANXPXACTXGC

SEQ ID NO: 6459 - protein, 17 aa, Artificial Sequence
  Synthetically generated peptide
  VARIANT (1)..(17): Xaa = Any Amino Acid
ACXELCANXPXACTGXC

SEQ ID NO: 6460 - protein, 16 aa, Artificial Sequence
  Synthetically generated peptide
  VARIANT (1)..(16): Xaa = Any Amino Acid
ACXELCANXPAXCTGC

SEQ ID NO: 6461 - protein, 17 aa, Artificial Sequence
  Synthetically generated peptide
  VARIANT (1)..(17): Xaa = Any Amino Acid
ACXELCANXPAXXCTGC

SEQ ID NO: 6462 - protein, 17 aa, Artificial Sequence
  Synthetically generated peptide
  VARIANT (1)..(17): Xaa = Any Amino Acid
ACXELCANXPAXCXTGC

SEQ ID NO: 6463 - protein, 17 aa, Artificial Sequence
  Synthetically generated peptide
  VARIANT (1)..(17): Xaa = Any Amino Acid
ACXELCANXPAXCTXGC

SEQ ID NO: 6464 - protein, 17 aa, Artificial Sequence
  Synthetically generated peptide
  VARIANT (1)..(17): Xaa = Any Amino Acid
ACXELCANXPAXCTGXC

SEQ ID NO: 6465 - protein, 16 aa, Artificial Sequence
  Synthetically generated peptide
  VARIANT (1)..(16): Xaa = Any Amino Acid
ACXELCANXPACXTGC

SEQ ID NO: 6466 - protein, 17 aa, Artificial Sequence
  Synthetically generated peptide
  VARIANT (1)..(17): Xaa = Any Amino Acid
ACXELCANXPACXXTGC

SEQ ID NO: 6467 - protein, 17 aa, Artificial Sequence
  Synthetically generated peptide
  VARIANT (1)..(17): Xaa = Any Amino Acid
ACXELCANXPACXTXGC

SEQ ID NO: 6468 - protein, 17 aa, Artificial Sequence
  Synthetically generated peptide
  VARIANT (1)..(17): Xaa = Any Amino Acid
ACXELCANXPACXTGXC

SEQ ID NO: 6469 - protein, 16 aa, Artificial Sequence
  Synthetically generated peptide
  VARIANT (1)..(16): Xaa = Any Amino Acid
ACXELCANXPACTXGC

SEQ ID NO: 6470 - protein, 17 aa, Artificial Sequence
  Synthetically generated peptide
  VARIANT (1)..(17): Xaa = Any Amino Acid
ACXELCANXPACTXXGC

SEQ ID NO: 6471 - protein, 17 aa, Artificial Sequence
  Synthetically generated peptide
  VARIANT (1)..(17): Xaa = Any Amino Acid
ACXELCANXPACTXGXC

SEQ ID NO: 6472 - protein, 16 aa, Artificial Sequence
  Synthetically generated peptide
  VARIANT (1)..(16): Xaa = Any Amino Acid
ACXELCANXPACTGXC

SEQ ID NO: 6473 - protein, 17 aa, Artificial Sequence
  Synthetically generated peptide
  VARIANT (1)..(17): Xaa = Any Amino Acid
ACXELCANXPACTGXXC

SEQ ID NO: 6474 - protein, 15 aa, Artificial Sequence
  Synthetically generated peptide
  VARIANT (1)..(15): Xaa = Any Amino Acid
ACXELCANPXACTGC

SEQ ID NO: 6475 - protein, 16 aa, Artificial Sequence
  Synthetically generated peptide
  VARIANT (1)..(16): Xaa = Any Amino Acid
ACXELCANPXXACTGC

SEQ ID NO: 6476 - protein, 17 aa, Artificial Sequence
  Synthetically generated peptide
  VARIANT (1)..(17): Xaa = Any Amino Acid
ACXELCANPXXXACTGC

SEQ ID NO: 6477 - protein, 17 aa, Artificial Sequence
  Synthetically generated peptide
  VARIANT (1)..(17): Xaa = Any Amino Acid
ACXELCANPXXAXCTGC

SEQ ID NO: 6478 - protein, 17 aa, Artificial Sequence
  Synthetically generated peptide
  VARIANT (1)..(17): Xaa = Any Amino Acid
ACXELCANPXXACXTGC

SEQ ID NO: 6479 - protein, 17 aa, Artificial Sequence
  Synthetically generated peptide
  VARIANT (1)..(17): Xaa = Any Amino Acid
ACXELCANPXXACTXGC

SEQ ID NO: 6480 - protein, 17 aa, Artificial Sequence
  Synthetically generated peptide
  VARIANT (1)..(17): Xaa = Any Amino Acid
ACXELCANPXXACTGXC

SEQ ID NO: 6481 - protein, 16 aa, Artificial Sequence
  Synthetically generated peptide
  VARIANT (1)..(16): Xaa = Any Amino Acid
ACXELCANPXAXCTGC

SEQ ID NO: 6482 - protein, 17 aa, Artificial Sequence
  Synthetically generated peptide
  VARIANT (1)..(17): Xaa = Any Amino Acid
ACXELCANPXAXXCTGC

SEQ ID NO: 6483 - protein, 17 aa, Artificial Sequence
  Synthetically generated peptide
  VARIANT (1)..(17): Xaa = Any Amino Acid
ACXELCANPXAXCXTGC

SEQ ID NO: 6484 - protein, 17 aa, Artificial Sequence
  Synthetically generated peptide
  VARIANT (1)..(17): Xaa = Any Amino Acid
ACXELCANPXAXCTXGC

SEQ ID NO: 6485 - protein, 17 aa, Artificial Sequence
  Synthetically generated peptide
  VARIANT (1)..(17): Xaa = Any Amino Acid
ACXELCANPXAXCTGXC

SEQ ID NO: 6486 - protein, 16 aa, Artificial Sequence
  Synthetically generated peptide
  VARIANT (1)..(16): Xaa = Any Amino Acid
ACXELCANPXACXTGC

SEQ ID NO: 6487 - protein, 17 aa, Artificial Sequence
  Synthetically generated peptide
  VARIANT (1)..(17): Xaa = Any Amino Acid
ACXELCANPXACXXTGC

SEQ ID NO: 6488 - protein, 17 aa, Artificial Sequence
  Synthetically generated peptide
  VARIANT (1)..(17): Xaa = Any Amino Acid
ACXELCANPXACXTXGC

SEQ ID NO: 6489 - protein, 17 aa, Artificial Sequence
  Synthetically generated peptide
  VARIANT (1)..(17): Xaa = Any Amino Acid
ACXELCANPXACXTGXC

SEQ ID NO: 6490 - protein, 16 aa, Artificial Sequence
  Synthetically generated peptide
  VARIANT (1)..(16): Xaa = Any Amino Acid
ACXELCANPXACTXGC

SEQ ID NO: 6491 - protein, 17 aa, Artificial Sequence
  Synthetically generated peptide
  VARIANT (1)..(17): Xaa = Any Amino Acid
ACXELCANPXACTXXGC

SEQ ID NO: 6492 - protein, 17 aa, Artificial Sequence
  Synthetically generated peptide
  VARIANT (1)..(17): Xaa = Any Amino Acid
ACXELCANPXACTXGXC

SEQ ID NO: 6493 - protein, 16 aa, Artificial Sequence
  Synthetically generated peptide
  VARIANT (1)..(16): Xaa = Any Amino Acid
ACXELCANPXACTGXC

SEQ ID NO: 6494 - protein, 17 aa, Artificial Sequence
  Synthetically generated peptide
  VARIANT (1)..(17): Xaa = Any Amino Acid
ACXELCANPXACTGXXC

SEQ ID NO: 6495 - protein, 15 aa, Artificial Sequence
  Synthetically generated peptide
  VARIANT (1)..(15): Xaa = Any Amino Acid
ACXELCANPAXCTGC

SEQ ID NO: 6496 - protein, 16 aa, Artificial Sequence
  Synthetically generated peptide
  VARIANT (1)..(16): Xaa = Any Amino Acid
ACXELCANPAXXCTGC

SEQ ID NO: 6497 - protein, 17 aa, Artificial Sequence
  Synthetically generated peptide
  VARIANT (1)..(17): Xaa = Any Amino Acid
ACXELCANPAXXXCTGC

SEQ ID NO: 6498 - protein, 17 aa, Artificial Sequence
  Synthetically generated peptide
  VARIANT (1)..(17): Xaa = Any Amino Acid
ACXELCANPAXXCXTGC

SEQ ID NO: 6499 - protein, 17 aa, Artificial Sequence
  Synthetically generated peptide
  VARIANT (1)..(17): Xaa = Any Amino Acid
ACXELCANPAXXCTXGC

SEQ ID NO: 6500 - protein, 17 aa, Artificial Sequence
  Synthetically generated peptide
  VARIANT (1)..(17): Xaa = Any Amino Acid
ACXELCANPAXXCTGXC

SEQ ID NO: 6501 - protein, 16 aa, Artificial Sequence
  Synthetically generated peptide
  VARIANT (1)..(16): Xaa = Any Amino Acid
ACXELCANPAXCXTGC

SEQ ID NO: 6502 - protein, 17 aa, Artificial Sequence
  Synthetically generated peptide
  VARIANT (1)..(17): Xaa = Any Amino Acid
ACXELCANPAXCXXTGC

SEQ ID NO: 6503 - protein, 17 aa, Artificial Sequence
  Synthetically generated peptide
  VARIANT (1)..(17): Xaa = Any Amino Acid
ACXELCANPAXCXTXGC

SEQ ID NO: 6504 - protein, 17 aa, Artificial Sequence
  Synthetically generated peptide
  VARIANT (1)..(17): Xaa = Any Amino Acid
ACXELCANPAXCXTGXC

SEQ ID NO: 6505 - protein, 16 aa, Artificial Sequence
  Synthetically generated peptide
  VARIANT (1)..(16): Xaa = Any Amino Acid
ACXELCANPAXCTXGC

SEQ ID NO: 6506 - protein, 17 aa, Artificial Sequence
  Synthetically generated peptide
  VARIANT (1)..(17): Xaa = Any Amino Acid
ACXELCANPAXCTXXGC

SEQ ID NO: 6507 - protein, 17 aa, Artificial Sequence
  Synthetically generated peptide
  VARIANT (1)..(17): Xaa = Any Amino Acid
ACXELCANPAXCTXGXC

SEQ ID NO: 6508 - protein, 16 aa, Artificial Sequence
  Synthetically generated peptide
  VARIANT (1)..(16): Xaa = Any Amino Acid
ACXELCANPAXCTGXC

SEQ ID NO: 6509 - protein, 17 aa, Artificial Sequence
  Synthetically generated peptide
  VARIANT (1)..(17): Xaa = Any Amino Acid
ACXELCANPAXCTGXXC

SEQ ID NO: 6510 - protein, 15 aa, Artificial Sequence
  Synthetically generated peptide
  VARIANT (1)..(15): Xaa = Any Amino Acid
ACXELCANPACXTGC

SEQ ID NO: 6511 - protein, 16 aa, Artificial Sequence
  Synthetically generated peptide
  VARIANT (1)..(16): Xaa = Any Amino Acid
ACXELCANPACXXTGC

SEQ ID NO: 6512 - protein, 17 aa, Artificial Sequence
  Synthetically generated peptide
  VARIANT (1)..(17): Xaa = Any Amino Acid
ACXELCANPACXXXTGC

SEQ ID NO: 6513 - protein, 17 aa, Artificial Sequence
  Synthetically generated peptide
  VARIANT (1)..(17): Xaa = Any Amino Acid
ACXELCANPACXXTXGC

SEQ ID NO: 6514 - protein, 17 aa, Artificial Sequence
  Synthetically generated peptide
  VARIANT (1)..(17): Xaa = Any Amino Acid
ACXELCANPACXXTGXC

SEQ ID NO: 6515 - protein, 16 aa, Artificial Sequence
  Synthetically generated peptide
  VARIANT (1)..(16): Xaa = Any Amino Acid
ACXELCANPACXTXGC

SEQ ID NO: 6516 - protein, 17 aa, Artificial Sequence
  Synthetically generated peptide
  VARIANT (1)..(17): Xaa = Any Amino Acid
ACXELCANPACXTXXGC

SEQ ID NO: 6517 - protein, 17 aa, Artificial Sequence
  Synthetically generated peptide
  VARIANT (1)..(17): Xaa = Any Amino Acid
ACXELCANPACXTXGXC

SEQ ID NO: 6518 - protein, 16 aa, Artificial Sequence
  Synthetically generated peptide
  VARIANT (1)..(16): Xaa = Any Amino Acid
ACXELCANPACXTGXC

SEQ ID NO: 6519 - protein, 17 aa, Artificial Sequence
  Synthetically generated peptide
  VARIANT (1)..(17): Xaa = Any Amino Acid
ACXELCANPACXTGXXC

SEQ ID NO: 6520 - protein, 15 aa, Artificial Sequence
  Synthetically generated peptide
  VARIANT (1)..(15): Xaa = Any Amino Acid
ACXELCANPACTXGC

SEQ ID NO: 6521 - protein, 16 aa, Artificial Sequence
  Synthetically generated peptide
  VARIANT (1)..(16): Xaa = Any Amino Acid
ACXELCANPACTXXGC

SEQ ID NO: 6522 - protein, 17 aa, Artificial Sequence
  Synthetically generated peptide
  VARIANT (1)..(17): Xaa = Any Amino Acid
ACXELCANPACTXXXGC

SEQ ID NO: 6523 - protein, 17 aa, Artificial Sequence
  Synthetically generated peptide
  VARIANT (1)..(17): Xaa = Any Amino Acid
ACXELCANPACTXXGXC

SEQ ID NO: 6524 - protein, 16 aa, Artificial Sequence
  Synthetically generated peptide
  VARIANT (1)..(16): Xaa = Any Amino Acid
ACXELCANPACTXGXC

SEQ ID NO: 6525 - protein, 17 aa, Artificial Sequence
  Synthetically generated peptide
  VARIANT (1)..(17): Xaa = Any Amino Acid
ACXELCANPACTXGXXC

SEQ ID NO: 6526 - protein, 15 aa, Artificial Sequence
  Synthetically generated peptide
  VARIANT (1)..(15): Xaa = Any Amino Acid
ACXELCANPACTGXC

SEQ ID NO: 6527 - protein, 16 aa, Artificial Sequence
  Synthetically generated peptide
  VARIANT (1)..(16): Xaa = Any Amino Acid
ACXELCANPACTGXXC

SEQ ID NO: 6528 - protein, 17 aa, Artificial Sequence
  Synthetically generated peptide
  VARIANT (1)..(17): Xaa = Any Amino Acid
ACXELCANPACTGXXXC

SEQ ID NO: 6529 - protein, 14 aa, Artificial Sequence
  Synthetically generated peptide
  VARIANT (1)..(14): Xaa = Any Amino Acid
ACEXLCANPACTGC

SEQ ID NO: 6530 - protein, 15 aa, Artificial Sequence
  Synthetically generated peptide
  VARIANT (1)..(15): Xaa = Any Amino Acid
ACEXXLCANPACTGC

SEQ ID NO: 6531 - protein, 16 aa, Artificial Sequence
  Synthetically generated peptide
  VARIANT (1)..(16): Xaa = Any Amino Acid
ACEXXXLCANPACTGC

SEQ ID NO: 6532 - protein, 17 aa, Artificial Sequence
  Synthetically generated peptide
  VARIANT (1)..(17): Xaa = Any Amino Acid
ACEXXXXLCANPACTGC

SEQ ID NO: 6533 - protein, 17 aa, Artificial Sequence
  Synthetically generated peptide
  VARIANT (1)..(17): Xaa = Any Amino Acid
ACEXXXLXCANPACTGC

SEQ ID NO: 6534 - protein, 17 aa, Artificial Sequence
  Synthetically generated peptide
  VARIANT (1)..(17): Xaa = Any Amino Acid
ACEXXXLCAXNPACTGC

SEQ ID NO: 6535 - protein, 17 aa, Artificial Sequence
  Synthetically generated peptide
  VARIANT (1)..(17): Xaa = Any Amino Acid
ACEXXXLCANXPACTGC

SEQ ID NO: 6536 - protein, 17 aa, Artificial Sequence
  Synthetically generated peptide
  VARIANT (1)..(17): Xaa = Any Amino Acid
ACEXXXLCANPXACTGC

SEQ ID NO: 6537 - protein, 17 aa, Artificial Sequence
  Synthetically generated peptide
  VARIANT (1)..(17): Xaa = Any Amino Acid
ACEXXXLCANPAXCTGC

SEQ ID NO: 6538 - protein, 17 aa, Artificial Sequence
  Synthetically generated peptide
  VARIANT (1)..(17): Xaa = Any Amino Acid
ACEXXXLCANPACXTGC

SEQ ID NO: 6539 - protein, 17 aa, Artificial Sequence
  Synthetically generated peptide
  VARIANT (1)..(17): Xaa = Any Amino Acid
ACEXXXLCANPACTXGC

SEQ ID NO: 6540 - protein, 17 aa, Artificial Sequence
  Synthetically generated peptide
  VARIANT (1)..(17): Xaa = Any Amino Acid
ACEXXXLCANPACTGXC

SEQ ID NO: 6541 - protein, 16 aa, Artificial Sequence
  Synthetically generated peptide
  VARIANT (1)..(16): Xaa = Any Amino Acid
ACEXXLXCANPACTGC

SEQ ID NO: 6542 - protein, 17 aa, Artificial Sequence
  Synthetically generated peptide
  VARIANT (1)..(17): Xaa = Any Amino Acid
ACEXXLXXCANPACTGC

SEQ ID NO: 6543 - protein, 17 aa, Artificial Sequence
  Synthetically generated peptide
  VARIANT (1)..(17): Xaa = Any Amino Acid
ACEXXLXCAXNPACTGC

SEQ ID NO: 6544 - protein, 17 aa, Artificial Sequence
  Synthetically generated peptide
  VARIANT (1)..(17): Xaa = Any Amino Acid
ACEXXLXCANXPACTGC

SEQ ID NO: 6545 - protein, 17 aa, Artificial Sequence
  Synthetically generated peptide
  VARIANT (1)..(17): Xaa = Any Amino Acid
ACEXXLXCANPXACTGC

SEQ ID NO: 6546 - protein, 17 aa, Artificial Sequence
  Synthetically generated peptide
  VARIANT (1)..(17): Xaa = Any Amino Acid
ACEXXLXCANPAXCTGC

SEQ ID NO: 6547 - protein, 17 aa, Artificial Sequence
  Synthetically generated peptide
  VARIANT (1)..(17): Xaa = Any Amino Acid
ACEXXLXCANPACXTGC

SEQ ID NO: 6548 - protein, 17 aa, Artificial Sequence
  Synthetically generated peptide
  VARIANT (1)..(17): Xaa = Any Amino Acid
ACEXXLXCANPACTXGC

SEQ ID NO: 6549 - protein, 17 aa, Artificial Sequence
  Synthetically generated peptide
  VARIANT (1)..(17): Xaa = Any Amino Acid
ACEXXLXCANPACTGXC

SEQ ID NO: 6550 - protein, 16 aa, Artificial Sequence
  Synthetically generated peptide
  VARIANT (1)..(16): Xaa = Any Amino Acid
ACEXXLCAXNPACTGC

SEQ ID NO: 6551 - protein, 17 aa, Artificial Sequence
  Synthetically generated peptide
  VARIANT (1)..(17): Xaa = Any Amino Acid
ACEXXLCAXXNPACTGC

SEQ ID NO: 6552 - protein, 17 aa, Artificial Sequence
  Synthetically generated peptide
  VARIANT (1)..(17): Xaa = Any Amino Acid
ACEXXLCAXNXPACTGC

SEQ ID NO: 6553 - protein, 17 aa, Artificial Sequence
  Synthetically generated peptide
  VARIANT (1)..(17): Xaa = Any Amino Acid
ACEXXLCAXNPXACTGC

SEQ ID NO: 6554 - protein, 17 aa, Artificial Sequence
  Synthetically generated peptide
  VARIANT (1)..(17): Xaa = Any Amino Acid
ACEXXLCAXNPAXCTGC

SEQ ID NO: 6555 - protein, 17 aa, Artificial Sequence
  Synthetically generated peptide
  VARIANT (1)..(17): Xaa = Any Amino Acid
ACEXXLCAXNPACXTGC

SEQ ID NO: 6556 - protein, 17 aa, Artificial Sequence
  Synthetically generated peptide
  VARIANT (1)..(17): Xaa = Any Amino Acid
ACEXXLCAXNPACTXGC

SEQ ID NO: 6557 - protein, 17 aa, Artificial Sequence
  Synthetically generated peptide
  VARIANT (1)..(17): Xaa = Any Amino Acid
ACEXXLCAXNPACTGXC

SEQ ID NO: 6558 - protein, 16 aa, Artificial Sequence
  Synthetically generated peptide
  VARIANT (1)..(16): Xaa = Any Amino Acid
ACEXXLCANXPACTGC

SEQ ID NO: 6559 - protein, 17 aa, Artificial Sequence
  Synthetically generated peptide
  VARIANT (1)..(17): Xaa = Any Amino Acid
ACEXXLCANXXPACTGC

SEQ ID NO: 6560 - protein, 17 aa, Artificial Sequence
  Synthetically generated peptide
  VARIANT (1)..(17): Xaa = Any Amino Acid
ACEXXLCANXPXACTGC

SEQ ID NO: 6561 - protein, 17 aa, Artificial Sequence
  Synthetically generated peptide
  VARIANT (1)..(17): Xaa = Any Amino Acid
ACEXXLCANXPAXCTGC

SEQ ID NO: 6562 - protein, 17 aa, Artificial Sequence
  Synthetically generated peptide
  VARIANT (1)..(17): Xaa = Any Amino Acid
ACEXXLCANXPACXTGC

SEQ ID NO: 6563 - protein, 17 aa, Artificial Sequence
  Synthetically generated peptide
  VARIANT (1)..(17): Xaa = Any Amino Acid
ACEXXLCANXPACTXGC

SEQ ID NO: 6564 - protein, 17 aa, Artificial Sequence
  Synthetically generated peptide
  VARIANT (1)..(17): Xaa = Any Amino Acid
ACEXXLCANXPACTGXC

SEQ ID NO: 6565 - protein, 16 aa, Artificial Sequence
  Synthetically generated peptide
  VARIANT (1)..(16): Xaa = Any Amino Acid
ACEXXLCANPXACTGC

SEQ ID NO: 6566 - protein, 17 aa, Artificial Sequence
  Synthetically generated peptide
  VARIANT (1)..(17): Xaa = Any Amino Acid
ACEXXLCANPXXACTGC

SEQ ID NO: 6567 - protein, 17 aa, Artificial Sequence
  Synthetically generated peptide
  VARIANT (1)..(17): Xaa = Any Amino Acid
ACEXXLCANPXAXCTGC

SEQ ID NO: 6568 - protein, 17 aa, Artificial Sequence
  Synthetically generated peptide
  VARIANT (1)..(17): Xaa = Any Amino Acid
ACEXXLCANPXACXTGC

SEQ ID NO: 6569 - protein, 17 aa, Artificial Sequence
  Synthetically generated peptide
  VARIANT (1)..(17): Xaa = Any Amino Acid
ACEXXLCANPXACTXGC

SEQ ID NO: 6570 - protein, 17 aa, Artificial Sequence
  Synthetically generated peptide
  VARIANT (1)..(17): Xaa = Any Amino Acid
ACEXXLCANPXACTGXC

SEQ ID NO: 6571 - protein, 16 aa, Artificial Sequence
  Synthetically generated peptide
  VARIANT (1)..(16): Xaa = Any Amino Acid
ACEXXLCANPAXCTGC

SEQ ID NO: 6572 - protein, 17 aa, Artificial Sequence
  Synthetically generated peptide
  VARIANT (1)..(17): Xaa = Any Amino Acid
ACEXXLCANPAXXCTGC

SEQ ID NO: 6573 - protein, 17 aa, Artificial Sequence
  Synthetically generated peptide
  VARIANT (1)..(17): Xaa = Any Amino Acid
ACEXXLCANPAXCXTGC

SEQ ID NO: 6574 - protein, 17 aa, Artificial Sequence
  Synthetically generated peptide
  VARIANT (1)..(17): Xaa = Any Amino Acid
ACEXXLCANPAXCTXGC

SEQ ID NO: 6575 - protein, 17 aa, Artificial Sequence
  Synthetically generated peptide
  VARIANT (1)..(17): Xaa = Any Amino Acid
ACEXXLCANPAXCTGXC

SEQ ID NO: 6576 - protein, 16 aa, Artificial Sequence
  Synthetically generated peptide
  VARIANT (1)..(16): Xaa = Any Amino Acid
ACEXXLCANPACXTGC

SEQ ID NO: 6577 - protein, 17 aa, Artificial Sequence
  Synthetically generated peptide
  VARIANT (1)..(17): Xaa = Any Amino Acid
ACEXXLCANPACXXTGC

SEQ ID NO: 6578 - protein, 17 aa, Artificial Sequence
  Synthetically generated peptide
  VARIANT (1)..(17): Xaa = Any Amino Acid
ACEXXLCANPACXTXGC

SEQ ID NO: 6579 - protein, 17 aa, Artificial Sequence
  Synthetically generated peptide
  VARIANT (1)..(17): Xaa = Any Amino Acid
ACEXXLCANPACXTGXC

SEQ ID NO: 6580 - protein, 16 aa, Artificial Sequence
  Synthetically generated peptide
  VARIANT (1)..(16): Xaa = Any Amino Acid
ACEXXLCANPACTXGC

SEQ ID NO: 6581 - protein, 17 aa, Artificial Sequence
  Synthetically generated peptide
  VARIANT (1)..(17): Xaa = Any Amino Acid
ACEXXLCANPACTXXGC

SEQ ID NO: 6582 - protein, 17 aa, Artificial Sequence
  Synthetically generated peptide
  VARIANT (1)..(17): Xaa = Any Amino Acid
ACEXXLCANPACTXGXC

SEQ ID NO: 6583 - protein, 16 aa, Artificial Sequence
  Synthetically generated peptide
  VARIANT (1)..(16): Xaa = Any Amino Acid
ACEXXLCANPACTGXC

SEQ ID NO: 6584 - protein, 17 aa, Artificial Sequence
  Synthetically generated peptide
  VARIANT (1)..(17): Xaa = Any Amino Acid
ACEXXLCANPACTGXXC

SEQ ID NO: 6585 - protein, 15 aa, Artificial Sequence
  Synthetically generated peptide
  VARIANT (1)..(15): Xaa = Any Amino Acid
ACEXLXCANPACTGC

SEQ ID NO: 6586 - protein, 16 aa, Artificial Sequence
  Synthetically generated peptide
  VARIANT (1)..(16): Xaa = Any Amino Acid
ACEXLXXCANPACTGC

SEQ ID NO: 6587 - protein, 17 aa, Artificial Sequence
  Synthetically generated peptide
  VARIANT (1)..(17): Xaa = Any Amino Acid
ACEXLXXXCANPACTGC

SEQ ID NO: 6588 - protein, 17 aa, Artificial Sequence
  Synthetically generated peptide
  VARIANT (1)..(17): Xaa = Any Amino Acid
ACEXLXXCAXNPACTGC

SEQ ID NO: 6589 - protein, 17 aa, Artificial Sequence
  Synthetically generated peptide
  VARIANT (1)..(17): Xaa = Any Amino Acid
ACEXLXXCANXPACTGC

SEQ ID NO: 6590 - protein, 17 aa, Artificial Sequence
  Synthetically generated peptide
  VARIANT (1)..(17): Xaa = Any Amino Acid
ACEXLXXCANPXACTGC

SEQ ID NO: 6591 - protein, 17 aa, Artificial Sequence
  Synthetically generated peptide
  VARIANT (1)..(17): Xaa = Any Amino Acid
ACEXLXXCANPAXCTGC

SEQ ID NO: 6592 - protein, 17 aa, Artificial Sequence
  Synthetically generated peptide
  VARIANT (1)..(17): Xaa = Any Amino Acid
ACEXLXXCANPACXTGC

SEQ ID NO: 6593 - protein, 17 aa, Artificial Sequence
  Synthetically generated peptide
  VARIANT (1)..(17): Xaa = Any Amino Acid
ACEXLXXCANPACTXGC

SEQ ID NO: 6594 - protein, 17 aa, Artificial Sequence
  Synthetically generated peptide
  VARIANT (1)..(17): Xaa = Any Amino Acid
ACEXLXXCANPACTGXC

SEQ ID NO: 6595 - protein, 16 aa, Artificial Sequence
  Synthetically generated peptide
  VARIANT (1)..(16): Xaa = Any Amino Acid
ACEXLXCAXNPACTGC

SEQ ID NO: 6596 - protein, 17 aa, Artificial Sequence
  Synthetically generated peptide
  VARIANT (1)..(17): Xaa = Any Amino Acid
ACEXLXCAXXNPACTGC

SEQ ID NO: 6597 - protein, 17 aa, Artificial Sequence
  Synthetically generated peptide
  VARIANT (1)..(17): Xaa = Any Amino Acid
ACEXLXCAXNXPACTGC

SEQ ID NO: 6598 - protein, 17 aa, Artificial Sequence
  Synthetically generated peptide
  VARIANT (1)..(17): Xaa = Any Amino Acid
ACEXLXCAXNPXACTGC

SEQ ID NO: 6599 - protein, 17 aa, Artificial Sequence
  Synthetically generated peptide
  VARIANT (1)..(17): Xaa = Any Amino Acid
ACEXLXCAXNPAXCTGC

SEQ ID NO: 6600 - protein, 17 aa, Artificial Sequence
  Synthetically generated peptide
  VARIANT (1)..(17): Xaa = Any Amino Acid
ACEXLXCAXNPACXTGC

SEQ ID NO: 6601 - protein, 17 aa, Artificial Sequence
  Synthetically generated peptide
  VARIANT (1)..(17): Xaa = Any Amino Acid
ACEXLXCAXNPACTXGC

SEQ ID NO: 6602 - protein, 17 aa, Artificial Sequence
  Synthetically generated peptide
  VARIANT (1)..(17): Xaa = Any Amino Acid
ACEXLXCAXNPACTGXC

SEQ ID NO: 6603 - protein, 16 aa, Artificial Sequence
  Synthetically generated peptide
  VARIANT (1)..(16): Xaa = Any Amino Acid
ACEXLXCANXPACTGC

SEQ ID NO: 6604 - protein, 17 aa, Artificial Sequence
  Synthetically generated peptide
  VARIANT (1)..(17): Xaa = Any Amino Acid
ACEXLXCANXXPACTGC

SEQ ID NO: 6605 - protein, 17 aa, Artificial Sequence
  Synthetically generated peptide
  VARIANT (1)..(17): Xaa = Any Amino Acid
ACEXLXCANXPXACTGC

SEQ ID NO: 6606 - protein, 17 aa, Artificial Sequence
  Synthetically generated peptide
  VARIANT (1)..(17): Xaa = Any Amino Acid
ACEXLXCANXPAXCTGC

SEQ ID NO: 6607 - protein, 17 aa, Artificial Sequence
  Synthetically generated peptide
  VARIANT (1)..(17): Xaa = Any Amino Acid
ACEXLXCANXPACXTGC

SEQ ID NO: 6608 - protein, 17 aa, Artificial Sequence
  Synthetically generated peptide
  VARIANT (1)..(17): Xaa = Any Amino Acid
ACEXLXCANXPACTXGC

SEQ ID NO: 6609 - protein, 17 aa, Artificial Sequence
  Synthetically generated peptide
  VARIANT (1)..(17): Xaa = Any Amino Acid
ACEXLXCANXPACTGXC

SEQ ID NO: 6610 - protein, 16 aa, Artificial Sequence
  Synthetically generated peptide
  VARIANT (1)..(16): Xaa = Any Amino Acid
ACEXLXCANPXACTGC

SEQ ID NO: 6611 - protein, 17 aa, Artificial Sequence
  Synthetically generated peptide
  VARIANT (1)..(17): Xaa = Any Amino Acid
ACEXLXCANPXXACTGC

SEQ ID NO: 6612 - protein, 17 aa, Artificial Sequence
  Synthetically generated peptide
  VARIANT (1)..(17): Xaa = Any Amino Acid
ACEXLXCANPXAXCTGC

SEQ ID NO: 6613 - protein, 17 aa, Artificial Sequence
  Synthetically generated peptide
  VARIANT (1)..(17): Xaa = Any Amino Acid
ACEXLXCANPXACXTGC

SEQ ID NO: 6614 - protein, 17 aa, Artificial Sequence
  Synthetically generated peptide
  VARIANT (1)..(17): Xaa = Any Amino Acid
ACEXLXCANPXACTXGC

SEQ ID NO: 6615 - protein, 17 aa, Artificial Sequence
  Synthetically generated peptide
  VARIANT (1)..(17): Xaa = Any Amino Acid
ACEXLXCANPXACTGXC

SEQ ID NO: 6616 - protein, 16 aa, Artificial Sequence
  Synthetically generated peptide
  VARIANT (1)..(16): Xaa = Any Amino Acid
ACEXLXCANPAXCTGC

SEQ ID NO: 6617 - protein, 17 aa, Artificial Sequence
  Synthetically generated peptide
  VARIANT (1)..(17): Xaa = Any Amino Acid
ACEXLXCANPAXXCTGC

SEQ ID NO: 6618 - protein, 17 aa, Artificial Sequence
  Synthetically generated peptide
  VARIANT (1)..(17): Xaa = Any Amino Acid
ACEXLXCANPAXCXTGC

SEQ ID NO: 6619 - protein, 17 aa, Artificial Sequence
  Synthetically generated peptide
  VARIANT (1)..(17): Xaa = Any Amino Acid
ACEXLXCANPAXCTXGC

SEQ ID NO: 6620 - protein, 17 aa, Artificial Sequence
  Synthetically generated peptide
  VARIANT (1)..(17): Xaa = Any Amino Acid
ACEXLXCANPAXCTGXC

SEQ ID NO: 6621 - protein, 16 aa, Artificial Sequence
  Synthetically generated peptide
  VARIANT (1)..(16): Xaa = Any Amino Acid
ACEXLXCANPACXTGC

SEQ ID NO: 6622 - protein, 17 aa, Artificial Sequence
  Synthetically generated peptide
  VARIANT (1)..(17): Xaa = Any Amino Acid
ACEXLXCANPACXXTGC

SEQ ID NO: 6623 - protein, 17 aa, Artificial Sequence
  Synthetically generated peptide
  VARIANT (1)..(17): Xaa = Any Amino Acid
ACEXLXCANPACXTXGC

SEQ ID NO: 6624 - protein, 17 aa, Artificial Sequence
  Synthetically generated peptide
  VARIANT (1)..(17): Xaa = Any Amino Acid
ACEXLXCANPACXTGXC

SEQ ID NO: 6625 - protein, 16 aa, Artificial Sequence
  Synthetically generated peptide
  VARIANT (1)..(16): Xaa = Any Amino Acid
ACEXLXCANPACTXGC

SEQ ID NO: 6626 - protein, 17 aa, Artificial Sequence
  Synthetically generated peptide
  VARIANT (1)..(17): Xaa = Any Amino Acid
ACEXLXCANPACTXXGC

SEQ ID NO: 6627 - protein, 17 aa, Artificial Sequence
  Synthetically generated peptide
  VARIANT (1)..(17): Xaa = Any Amino Acid
ACEXLXCANPACTXGXC

SEQ ID NO: 6628 - protein, 16 aa, Artificial Sequence
  Synthetically generated peptide
  VARIANT (1)..(16): Xaa = Any Amino Acid
ACEXLXCANPACTGXC

SEQ ID NO: 6629 - protein, 17 aa, Artificial Sequence
  Synthetically generated peptide
  VARIANT (1)..(17): Xaa = Any Amino Acid
ACEXLXCANPACTGXXC

SEQ ID NO: 6630 - protein, 15 aa, Artificial Sequence
  Synthetically generated peptide
  VARIANT (1)..(15): Xaa = Any Amino Acid
ACEXLCAXNPACTGC

SEQ ID NO: 6631 - protein, 16 aa, Artificial Sequence
  Synthetically generated peptide
  VARIANT (1)..(16): Xaa = Any Amino Acid
ACEXLCAXXNPACTGC

SEQ ID NO: 6632 - protein, 17 aa, Artificial Sequence
  Synthetically generated peptide
  VARIANT (1)..(17): Xaa = Any Amino Acid
ACEXLCAXXXNPACTGC

SEQ ID NO: 6633 - protein, 17 aa, Artificial Sequence
  Synthetically generated peptide
  VARIANT (1)..(17): Xaa = Any Amino Acid
ACEXLCAXXNXPACTGC

SEQ ID NO: 6634 - protein, 17 aa, Artificial Sequence
  Synthetically generated peptide
  VARIANT (1)..(17): Xaa = Any Amino Acid
ACEXLCAXXNPXACTGC

SEQ ID NO: 6635 - protein, 17 aa, Artificial Sequence
  Synthetically generated peptide
  VARIANT (1)..(17): Xaa = Any Amino Acid
ACEXLCAXXNPAXCTGC

SEQ ID NO: 6636 - protein, 17 aa, Artificial Sequence
  Synthetically generated peptide
  VARIANT (1)..(17): Xaa = Any Amino Acid
ACEXLCAXXNPACXTGC

SEQ ID NO: 6637 - protein, 17 aa, Artificial Sequence
  Synthetically generated peptide
  VARIANT (1)..(17): Xaa = Any Amino Acid
ACEXLCAXXNPACTXGC

SEQ ID NO: 6638 - protein, 17 aa, Artificial Sequence
  Synthetically generated peptide
  VARIANT (1)..(17): Xaa = Any Amino Acid
ACEXLCAXXNPACTGXC

SEQ ID NO: 6639 - protein, 16 aa, Artificial Sequence
  Synthetically generated peptide
  VARIANT (1)..(16): Xaa = Any Amino Acid
ACEXLCAXNXPACTGC

SEQ ID NO: 6640 - protein, 17 aa, Artificial Sequence
  Synthetically generated peptide
  VARIANT (1)..(17): Xaa = Any Amino Acid
ACEXLCAXNXXPACTGC

SEQ ID NO: 6641 - protein, 17 aa, Artificial Sequence
  Synthetically generated peptide
  VARIANT (1)..(17): Xaa = Any Amino Acid
ACEXLCAXNXPXACTGC

SEQ ID NO: 6642 - protein, 17 aa, Artificial Sequence
  Synthetically generated peptide
  VARIANT (1)..(17): Xaa = Any Amino Acid
ACEXLCAXNXPAXCTGC

SEQ ID NO: 6643 - protein, 17 aa, Artificial Sequence
  Synthetically generated peptide
  VARIANT (1)..(17): Xaa = Any Amino Acid
ACEXLCAXNXPACXTGC

SEQ ID NO: 6644 - protein, 17 aa, Artificial Sequence
  Synthetically generated peptide
  VARIANT (1)..(17): Xaa = Any Amino Acid
ACEXLCAXNXPACTXGC

SEQ ID NO: 6645 - protein, 17 aa, Artificial Sequence
  Synthetically generated peptide
  VARIANT (1)..(17): Xaa = Any Amino Acid
ACEXLCAXNXPACTGXC

SEQ ID NO: 6646 - protein, 16 aa, Artificial Sequence
  Synthetically generated peptide
  VARIANT (1)..(16): Xaa = Any Amino Acid
ACEXLCAXNPXACTGC

SEQ ID NO: 6647 - protein, 17 aa, Artificial Sequence
  Synthetically generated peptide
  VARIANT (1)..(17): Xaa = Any Amino Acid
ACEXLCAXNPXXACTGC

SEQ ID NO: 6648 - protein, 17 aa, Artificial Sequence
  Synthetically generated peptide
  VARIANT (1)..(17): Xaa = Any Amino Acid
ACEXLCAXNPXAXCTGC

SEQ ID NO: 6649 - protein, 17 aa, Artificial Sequence
  Synthetically generated peptide
  VARIANT (1)..(17): Xaa = Any Amino Acid
ACEXLCAXNPXACXTGC

SEQ ID NO: 6650 - protein, 17 aa, Artificial Sequence
  Synthetically generated peptide
  VARIANT (1)..(17): Xaa = Any Amino Acid
ACEXLCAXNPXACTXGC

SEQ ID NO: 6651 - protein, 17 aa, Artificial Sequence
  Synthetically generated peptide
  VARIANT (1)..(17): Xaa = Any Amino Acid
ACEXLCAXNPXACTGXC

SEQ ID NO: 6652 - protein, 16 aa, Artificial Sequence
  Synthetically generated peptide
  VARIANT (1)..(16): Xaa = Any Amino Acid
ACEXLCAXNPAXCTGC

SEQ ID NO: 6653 - protein, 17 aa, Artificial Sequence
  Synthetically generated peptide
  VARIANT (1)..(17): Xaa = Any Amino Acid
ACEXLCAXNPAXXCTGC

SEQ ID NO: 6654 - protein, 17 aa, Artificial Sequence
  Synthetically generated peptide
  VARIANT (1)..(17): Xaa = Any Amino Acid
ACEXLCAXNPAXCXTGC

SEQ ID NO: 6655 - protein, 17 aa, Artificial Sequence
  Synthetically generated peptide
  VARIANT (1)..(17): Xaa = Any Amino Acid
ACEXLCAXNPAXCTXGC

SEQ ID NO: 6656 - protein, 17 aa, Artificial Sequence
  Synthetically generated peptide
  VARIANT (1)..(17): Xaa = Any Amino Acid
ACEXLCAXNPAXCTGXC

SEQ ID NO: 6657 - protein, 16 aa, Artificial Sequence
  Synthetically generated peptide
  VARIANT (1)..(16): Xaa = Any Amino Acid
ACEXLCAXNPACXTGC

SEQ ID NO: 6658 - protein, 17 aa, Artificial Sequence
  Synthetically generated peptide
  VARIANT (1)..(17): Xaa = Any Amino Acid
ACEXLCAXNPACXXTGC

SEQ ID NO: 6659 - protein, 17 aa, Artificial Sequence
  Synthetically generated peptide
  VARIANT (1)..(17): Xaa = Any Amino Acid
ACEXLCAXNPACXTXGC

SEQ ID NO: 6660 - protein, 17 aa, Artificial Sequence
  Synthetically generated peptide
  VARIANT (1)..(17): Xaa = Any Amino Acid
ACEXLCAXNPACXTGXC

SEQ ID NO: 6661 - protein, 16 aa, Artificial Sequence
  Synthetically generated peptide
  VARIANT (1)..(16): Xaa = Any Amino Acid
ACEXLCAXNPACTXGC

SEQ ID NO: 6662 - protein, 17 aa, Artificial Sequence
  Synthetically generated peptide
  VARIANT (1)..(17): Xaa = Any Amino Acid
ACEXLCAXNPACTXXGC

SEQ ID NO: 6663 - protein, 17 aa, Artificial Sequence
  Synthetically generated peptide
  VARIANT (1)..(17): Xaa = Any Amino Acid
ACEXLCAXNPACTXGXC

SEQ ID NO: 6664 - protein, 16 aa, Artificial Sequence
  Synthetically generated peptide
  VARIANT (1)..(16): Xaa = Any Amino Acid
ACEXLCAXNPACTGXC

SEQ ID NO: 6665 - protein, 17 aa, Artificial Sequence
  Synthetically generated peptide
  VARIANT (1)..(17): Xaa = Any Amino Acid
ACEXLCAXNPACTGXXC

SEQ ID NO: 6666 - protein, 15 aa, Artificial Sequence
  Synthetically generated peptide
  VARIANT (1)..(15): Xaa = Any Amino Acid
ACEXLCANXPACTGC

SEQ ID NO: 6667 - protein, 16 aa, Artificial Sequence
  Synthetically generated peptide
  VARIANT (1)..(16): Xaa = Any Amino Acid
ACEXLCANXXPACTGC

SEQ ID NO: 6668 - protein, 17 aa, Artificial Sequence
  Synthetically generated peptide
  VARIANT (1)..(17): Xaa = Any Amino Acid
ACEXLCANXXXPACTGC

SEQ ID NO: 6669 - protein, 17 aa, Artificial Sequence
  Synthetically generated peptide
  VARIANT (1)..(17): Xaa = Any Amino Acid
ACEXLCANXXPXACTGC

SEQ ID NO: 6670 - protein, 17 aa, Artificial Sequence
  Synthetically generated peptide
  VARIANT (1)..(17): Xaa = Any Amino Acid
ACEXLCANXXPAXCTGC

SEQ ID NO: 6671 - protein, 17 aa, Artificial Sequence
  Synthetically generated peptide
  VARIANT (1)..(17): Xaa = Any Amino Acid
ACEXLCANXXPACXTGC

SEQ ID NO: 6672 - protein, 17 aa, Artificial Sequence
  Synthetically generated peptide
  VARIANT (1)..(17): Xaa = Any Amino Acid
ACEXLCANXXPACTXGC

SEQ ID NO: 6673 - protein, 17 aa, Artificial Sequence
  Synthetically generated peptide
  VARIANT (1)..(17): Xaa = Any Amino Acid
ACEXLCANXXPACTGXC

SEQ ID NO: 6674 - protein, 16 aa, Artificial Sequence
  Synthetically generated peptide
  VARIANT (1)..(16): Xaa = Any Amino Acid
ACEXLCANXPXACTGC

SEQ ID NO: 6675 - protein, 17 aa, Artificial Sequence
  Synthetically generated peptide
  VARIANT (1)..(17): Xaa = Any Amino Acid
ACEXLCANXPXXACTGC

SEQ ID NO: 6676 - protein, 17 aa, Artificial Sequence
  Synthetically generated peptide
  VARIANT (1)..(17): Xaa = Any Amino Acid
ACEXLCANXPXAXCTGC

SEQ ID NO: 6677 - protein, 17 aa, Artificial Sequence
  Synthetically generated peptide
  VARIANT (1)..(17): Xaa = Any Amino Acid
ACEXLCANXPXACXTGC

SEQ ID NO: 6678 - protein, 17 aa, Artificial Sequence
  Synthetically generated peptide
  VARIANT (1)..(17): Xaa = Any Amino Acid
ACEXLCANXPXACTXGC

SEQ ID NO: 6679 - protein, 17 aa, Artificial Sequence
  Synthetically generated peptide
  VARIANT (1)..(17): Xaa = Any Amino Acid
ACEXLCANXPXACTGXC

SEQ ID NO: 6680 - protein, 16 aa, Artificial Sequence
  Synthetically generated peptide
  VARIANT (1)..(16): Xaa = Any Amino Acid
ACEXLCANXPAXCTGC

SEQ ID NO: 6681 - protein, 17 aa, Artificial Sequence
  Synthetically generated peptide
  VARIANT (1)..(17): Xaa = Any Amino Acid
ACEXLCANXPAXXCTGC

SEQ ID NO: 6682 - protein, 17 aa, Artificial Sequence
  Synthetically generated peptide
  VARIANT (1)..(17): Xaa = Any Amino Acid
ACEXLCANXPAXCXTGC

SEQ ID NO: 6683 - protein, 17 aa, Artificial Sequence
  Synthetically generated peptide
  VARIANT (1)..(17): Xaa = Any Amino Acid
ACEXLCANXPAXCTXGC

SEQ ID NO: 6684 - protein, 17 aa, Artificial Sequence
  Synthetically generated peptide
  VARIANT (1)..(17): Xaa = Any Amino Acid
ACEXLCANXPAXCTGXC

SEQ ID NO: 6685 - protein, 16 aa, Artificial Sequence
  Synthetically generated peptide
  VARIANT (1)..(16): Xaa = Any Amino Acid
ACEXLCANXPACXTGC

SEQ ID NO: 6686 - protein, 17 aa, Artificial Sequence
  Synthetically generated peptide
  VARIANT (1)..(17): Xaa = Any Amino Acid
ACEXLCANXPACXXTGC

SEQ ID NO: 6687 - protein, 17 aa, Artificial Sequence
  Synthetically generated peptide
  VARIANT (1)..(17): Xaa = Any Amino Acid
ACEXLCANXPACXTXGC

SEQ ID NO: 6688 - protein, 17 aa, Artificial Sequence
  Synthetically generated peptide
  VARIANT (1)..(17): Xaa = Any Amino Acid
ACEXLCANXPACXTGXC

SEQ ID NO: 6689 - protein, 16 aa, Artificial Sequence
  Synthetically generated peptide
  VARIANT (1)..(16): Xaa = Any Amino Acid
ACEXLCANXPACTXGC

SEQ ID NO: 6690 - protein, 17 aa, Artificial Sequence
  Synthetically generated peptide
  VARIANT (1)..(17): Xaa = Any Amino Acid
ACEXLCANXPACTXXGC

SEQ ID NO: 6691 - protein, 17 aa, Artificial Sequence
  Synthetically generated peptide
  VARIANT (1)..(17): Xaa = Any Amino Acid
ACEXLCANXPACTXGXC

SEQ ID NO: 6692 - protein, 16 aa, Artificial Sequence
  Synthetically generated peptide
  VARIANT (1)..(16): Xaa = Any Amino Acid
ACEXLCANXPACTGXC

SEQ ID NO: 6693 - protein, 17 aa, Artificial Sequence
  Synthetically generated peptide
  VARIANT (1)..(17): Xaa = Any Amino Acid
ACEXLCANXPACTGXXC

SEQ ID NO: 6694 - protein, 15 aa, Artificial Sequence
  Synthetically generated peptide
  VARIANT (1)..(15): Xaa = Any Amino Acid
ACEXLCANPXACTGC

SEQ ID NO: 6695 - protein, 16 aa, Artificial Sequence
  Synthetically generated peptide
  VARIANT (1)..(16): Xaa = Any Amino Acid
ACEXLCANPXXACTGC

SEQ ID NO: 6696 - protein, 17 aa, Artificial Sequence
  Synthetically generated peptide
  VARIANT (1)..(17): Xaa = Any Amino Acid
ACEXLCANPXXXACTGC

SEQ ID NO: 6697 - protein, 17 aa, Artificial Sequence
  Synthetically generated peptide
  VARIANT (1)..(17): Xaa = Any Amino Acid
ACEXLCANPXXAXCTGC

SEQ ID NO: 6698 - protein, 17 aa, Artificial Sequence
  Synthetically generated peptide
  VARIANT (1)..(17): Xaa = Any Amino Acid
ACEXLCANPXXACXTGC

SEQ ID NO: 6699 - protein, 17 aa, Artificial Sequence
  Synthetically generated peptide
  VARIANT (1)..(17): Xaa = Any Amino Acid
ACEXLCANPXXACTXGC

SEQ ID NO: 6700 - protein, 17 aa, Artificial Sequence
  Synthetically generated peptide
  VARIANT (1)..(17): Xaa = Any Amino Acid
ACEXLCANPXXACTGXC

SEQ ID NO: 6701 - protein, 16 aa, Artificial Sequence
  Synthetically generated peptide
  VARIANT (1)..(16): Xaa = Any Amino Acid
ACEXLCANPXAXCTGC

SEQ ID NO: 6702 - protein, 17 aa, Artificial Sequence
  Synthetically generated peptide
  VARIANT (1)..(17): Xaa = Any Amino Acid
ACEXLCANPXAXXCTGC

SEQ ID NO: 6703 - protein, 17 aa, Artificial Sequence
  Synthetically generated peptide
  VARIANT (1)..(17): Xaa = Any Amino Acid
ACEXLCANPXAXCXTGC

SEQ ID NO: 6704 - protein, 17 aa, Artificial Sequence
  Synthetically generated peptide
  VARIANT (1)..(17): Xaa = Any Amino Acid
ACEXLCANPXAXCTXGC

SEQ ID NO: 6705 - protein, 17 aa, Artificial Sequence
  Synthetically generated peptide
  VARIANT (1)..(17): Xaa = Any Amino Acid
ACEXLCANPXAXCTGXC

SEQ ID NO: 6706 - protein, 16 aa, Artificial Sequence
  Synthetically generated peptide
  VARIANT (1)..(16): Xaa = Any Amino Acid
ACEXLCANPXACXTGC

SEQ ID NO: 6707 - protein, 17 aa, Artificial Sequence
  Synthetically generated peptide
  VARIANT (1)..(17): Xaa = Any Amino Acid
ACEXLCANPXACXXTGC

SEQ ID NO: 6708 - protein, 17 aa, Artificial Sequence
  Synthetically generated peptide
  VARIANT (1)..(17): Xaa = Any Amino Acid
ACEXLCANPXACXTXGC

SEQ ID NO: 6709 - protein, 17 aa, Artificial Sequence
  Synthetically generated peptide
  VARIANT (1)..(17): Xaa = Any Amino Acid
ACEXLCANPXACXTGXC

SEQ ID NO: 6710 - protein, 16 aa, Artificial Sequence
  Synthetically generated peptide
  VARIANT (1)..(16): Xaa = Any Amino Acid
ACEXLCANPXACTXGC

SEQ ID NO: 6711 - protein, 17 aa, Artificial Sequence
  Synthetically generated peptide
  VARIANT (1)..(17): Xaa = Any Amino Acid
ACEXLCANPXACTXXGC

SEQ ID NO: 6712 - protein, 17 aa, Artificial Sequence
  Synthetically generated peptide
  VARIANT (1)..(17): Xaa = Any Amino Acid
ACEXLCANPXACTXGXC

SEQ ID NO: 6713 - protein, 16 aa, Artificial Sequence
  Synthetically generated peptide
  VARIANT (1)..(16): Xaa = Any Amino Acid
ACEXLCANPXACTGXC

SEQ ID NO: 6714 - protein, 17 aa, Artificial Sequence
  Synthetically generated peptide
  VARIANT (1)..(17): Xaa = Any Amino Acid
ACEXLCANPXACTGXXC

SEQ ID NO: 6715 - protein, 15 aa, Artificial Sequence
  Synthetically generated peptide
  VARIANT (1)..(15): Xaa = Any Amino Acid
ACEXLCANPAXCTGC

SEQ ID NO: 6716 - protein, 16 aa, Artificial Sequence
  Synthetically generated peptide
  VARIANT (1)..(16): Xaa = Any Amino Acid
ACEXLCANPAXXCTGC

SEQ ID NO: 6717 - protein, 17 aa, Artificial Sequence
  Synthetically generated peptide
  VARIANT (1)..(17): Xaa = Any Amino Acid
ACEXLCANPAXXXCTGC

SEQ ID NO: 6718 - protein, 17 aa, Artificial Sequence
  Synthetically generated peptide
  VARIANT (1)..(17): Xaa = Any Amino Acid
ACEXLCANPAXXCXTGC

SEQ ID NO: 6719 - protein, 17 aa, Artificial Sequence
  Synthetically generated peptide
  VARIANT (1)..(17): Xaa = Any Amino Acid
ACEXLCANPAXXCTXGC

SEQ ID NO: 6720 - protein, 17 aa, Artificial Sequence
  Synthetically generated peptide
  VARIANT (1)..(17): Xaa = Any Amino Acid
ACEXLCANPAXXCTGXC

SEQ ID NO: 6721 - protein, 16 aa, Artificial Sequence
  Synthetically generated peptide
  VARIANT (1)..(16): Xaa = Any Amino Acid
ACEXLCANPAXCXTGC

SEQ ID NO: 6722 - protein, 17 aa, Artificial Sequence
  Synthetically generated peptide
  VARIANT (1)..(17): Xaa = Any Amino Acid
ACEXLCANPAXCXXTGC

SEQ ID NO: 6723 - protein, 17 aa, Artificial Sequence
  Synthetically generated peptide
  VARIANT (1)..(17): Xaa = Any Amino Acid
ACEXLCANPAXCXTXGC

SEQ ID NO: 6724 - protein, 17 aa, Artificial Sequence
  Synthetically generated peptide
  VARIANT (1)..(17): Xaa = Any Amino Acid
ACEXLCANPAXCXTGXC

SEQ ID NO: 6725 - protein, 16 aa, Artificial Sequence
  Synthetically generated peptide
  VARIANT (1)..(16): Xaa = Any Amino Acid
ACEXLCANPAXCTXGC

SEQ ID NO: 6726 - protein, 17 aa, Artificial Sequence
  Synthetically generated peptide
  VARIANT (1)..(17): Xaa = Any Amino Acid
ACEXLCANPAXCTXXGC

SEQ ID NO: 6727 - protein, 17 aa, Artificial Sequence
  Synthetically generated peptide
  VARIANT (1)..(17): Xaa = Any Amino Acid
ACEXLCANPAXCTXGXC

SEQ ID NO: 6728 - protein, 16 aa, Artificial Sequence
  Synthetically generated peptide
  VARIANT (1)..(16): Xaa = Any Amino Acid
ACEXLCANPAXCTGXC

SEQ ID NO: 6729 - protein, 17 aa, Artificial Sequence
  Synthetically generated peptide
  VARIANT (1)..(17): Xaa = Any Amino Acid
ACEXLCANPAXCTGXXC

SEQ ID NO: 6730 - protein, 15 aa, Artificial Sequence
  Synthetically generated peptide
  VARIANT (1)..(15): Xaa = Any Amino Acid
ACEXLCANPACXTGC

SEQ ID NO: 6731 - protein, 16 aa, Artificial Sequence
  Synthetically generated peptide
  VARIANT (1)..(16): Xaa = Any Amino Acid
ACEXLCANPACXXTGC

SEQ ID NO: 6732 - protein, 17 aa, Artificial Sequence
  Synthetically generated peptide
  VARIANT (1)..(17): Xaa = Any Amino Acid
ACEXLCANPACXXXTGC

SEQ ID NO: 6733 - protein, 17 aa, Artificial Sequence
  Synthetically generated peptide
  VARIANT (1)..(17): Xaa = Any Amino Acid
ACEXLCANPACXXTXGC

SEQ ID NO: 6734 - protein, 17 aa, Artificial Sequence
  Synthetically generated peptide
  VARIANT (1)..(17): Xaa = Any Amino Acid
ACEXLCANPACXXTGXC

SEQ ID NO: 6735 - protein, 16 aa, Artificial Sequence
  Synthetically generated peptide
  VARIANT (1)..(16): Xaa = Any Amino Acid
ACEXLCANPACXTXGC

SEQ ID NO: 6736 - protein, 17 aa, Artificial Sequence
  Synthetically generated peptide
  VARIANT (1)..(17): Xaa = Any Amino Acid
ACEXLCANPACXTXXGC

SEQ ID NO: 6737 - protein, 17 aa, Artificial Sequence
  Synthetically generated peptide
  VARIANT (1)..(17): Xaa = Any Amino Acid
ACEXLCANPACXTXGXC

SEQ ID NO: 6738 - protein, 16 aa, Artificial Sequence
  Synthetically generated peptide
  VARIANT (1)..(16): Xaa = Any Amino Acid
ACEXLCANPACXTGXC

SEQ ID NO: 6739 - protein, 17 aa, Artificial Sequence
  Synthetically generated peptide
  VARIANT (1)..(17): Xaa = Any Amino Acid
ACEXLCANPACXTGXXC

SEQ ID NO: 6740 - protein, 15 aa, Artificial Sequence
  Synthetically generated peptide
  VARIANT (1)..(15): Xaa = Any Amino Acid
ACEXLCANPACTXGC

SEQ ID NO: 6741 - protein, 16 aa, Artificial Sequence
  Synthetically generated peptide
  VARIANT (1)..(16): Xaa = Any Amino Acid
ACEXLCANPACTXXGC

SEQ ID NO: 6742 - protein, 17 aa, Artificial Sequence
  Synthetically generated peptide
  VARIANT (1)..(17): Xaa = Any Amino Acid
ACEXLCANPACTXXXGC

SEQ ID NO: 6743 - protein, 17 aa, Artificial Sequence
  Synthetically generated peptide
  VARIANT (1)..(17): Xaa = Any Amino Acid
ACEXLCANPACTXXGXC

SEQ ID NO: 6744 - protein, 16 aa, Artificial Sequence
  Synthetically generated peptide
  VARIANT (1)..(16): Xaa = Any Amino Acid
ACEXLCANPACTXGXC

SEQ ID NO: 6745 - protein, 17 aa, Artificial Sequence
  Synthetically generated peptide
  VARIANT (1)..(17): Xaa = Any Amino Acid
ACEXLCANPACTXGXXC

SEQ ID NO: 6746 - protein, 15 aa, Artificial Sequence
  Synthetically generated peptide
  VARIANT (1)..(15): Xaa = Any Amino Acid
ACEXLCANPACTGXC

SEQ ID NO: 6747 - protein, 16 aa, Artificial Sequence
  Synthetically generated peptide
  VARIANT (1)..(16): Xaa = Any Amino Acid
ACEXLCANPACTGXXC

SEQ ID NO: 6748 - protein, 17 aa, Artificial Sequence
  Synthetically generated peptide
  VARIANT (1)..(17): Xaa = Any Amino Acid
ACEXLCANPACTGXXXC

SEQ ID NO: 6749 - protein, 14 aa, Artificial Sequence
  Synthetically generated peptide
  VARIANT (1)..(14): Xaa = Any Amino Acid
ACELXCANPACTGC

SEQ ID NO: 6750 - protein, 15 aa, Artificial Sequence
  Synthetically generated peptide
  VARIANT (1)..(15): Xaa = Any Amino Acid
ACELXXCANPACTGC

SEQ ID NO: 6751 - protein, 16 aa, Artificial Sequence
  Synthetically generated peptide
  VARIANT (1)..(16): Xaa = Any Amino Acid
ACELXXXCANPACTGC

SEQ ID NO: 6752 - protein, 17 aa, Artificial Sequence
  Synthetically generated peptide
  VARIANT (1)..(17): Xaa = Any Amino Acid
ACELXXXXCANPACTGC

SEQ ID NO: 6753 - protein, 17 aa, Artificial Sequence
  Synthetically generated peptide
  VARIANT (1)..(17): Xaa = Any Amino Acid
ACELXXXCAXNPACTGC

SEQ ID NO: 6754 - protein, 17 aa, Artificial Sequence
  Synthetically generated peptide
  VARIANT (1)..(17): Xaa = Any Amino Acid
ACELXXXCANXPACTGC

SEQ ID NO: 6755 - protein, 17 aa, Artificial Sequence
  Synthetically generated peptide
  VARIANT (1)..(17): Xaa = Any Amino Acid
ACELXXXCANPXACTGC

SEQ ID NO: 6756 - protein, 17 aa, Artificial Sequence
  Synthetically generated peptide
  VARIANT (1)..(17): Xaa = Any Amino Acid
ACELXXXCANPAXCTGC

SEQ ID NO: 6757 - protein, 17 aa, Artificial Sequence
  Synthetically generated peptide
  VARIANT (1)..(17): Xaa = Any Amino Acid
ACELXXXCANPACXTGC

SEQ ID NO: 6758 - protein, 17 aa, Artificial Sequence
  Synthetically generated peptide
  VARIANT (1)..(17): Xaa = Any Amino Acid
ACELXXXCANPACTXGC

SEQ ID NO: 6759 - protein, 17 aa, Artificial Sequence
  Synthetically generated peptide
  VARIANT (1)..(17): Xaa = Any Amino Acid
ACELXXXCANPACTGXC

SEQ ID NO: 6760 - protein, 16 aa, Artificial Sequence
  Synthetically generated peptide
  VARIANT (1)..(16): Xaa = Any Amino Acid
ACELXXCAXNPACTGC

SEQ ID NO: 6761 - protein, 17 aa, Artificial Sequence
  Synthetically generated peptide
  VARIANT (1)..(17): Xaa = Any Amino Acid
ACELXXCAXXNPACTGC

SEQ ID NO: 6762 - protein, 17 aa, Artificial Sequence
  Synthetically generated peptide
  VARIANT (1)..(17): Xaa = Any Amino Acid
ACELXXCAXNXPACTGC

SEQ ID NO: 6763 - protein, 17 aa, Artificial Sequence
  Synthetically generated peptide
  VARIANT (1)..(17): Xaa = Any Amino Acid
ACELXXCAXNPXACTGC

SEQ ID NO: 6764 - protein, 17 aa, Artificial Sequence
  Synthetically generated peptide
  VARIANT (1)..(17): Xaa = Any Amino Acid
ACELXXCAXNPAXCTGC

SEQ ID NO: 6765 - protein, 17 aa, Artificial Sequence
  Synthetically generated peptide
  VARIANT (1)..(17): Xaa = Any Amino Acid
ACELXXCAXNPACXTGC

SEQ ID NO: 6766 - protein, 17 aa, Artificial Sequence
  Synthetically generated peptide
  VARIANT (1)..(17): Xaa = Any Amino Acid
ACELXXCAXNPACTXGC

SEQ ID NO: 6767 - protein, 17 aa, Artificial Sequence
  Synthetically generated peptide
  VARIANT (1)..(17): Xaa = Any Amino Acid
ACELXXCAXNPACTGXC

SEQ ID NO: 6768 - protein, 16 aa, Artificial Sequence
  Synthetically generated peptide
  VARIANT (1)..(16): Xaa = Any Amino Acid
ACELXXCANXPACTGC

SEQ ID NO: 6769 - protein, 17 aa, Artificial Sequence
  Synthetically generated peptide
  VARIANT (1)..(17): Xaa = Any Amino Acid
ACELXXCANXXPACTGC

SEQ ID NO: 6770 - protein, 17 aa, Artificial Sequence
  Synthetically generated peptide
  VARIANT (1)..(17): Xaa = Any Amino Acid
ACELXXCANXPXACTGC

SEQ ID NO: 6771 - protein, 17 aa, Artificial Sequence
  Synthetically generated peptide
  VARIANT (1)..(17): Xaa = Any Amino Acid
ACELXXCANXPAXCTGC

SEQ ID NO: 6772 - protein, 17 aa, Artificial Sequence
  Synthetically generated peptide
  VARIANT (1)..(17): Xaa = Any Amino Acid
ACELXXCANXPACXTGC

SEQ ID NO: 6773 - protein, 17 aa, Artificial Sequence
  Synthetically generated peptide
  VARIANT (1)..(17): Xaa = Any Amino Acid
ACELXXCANXPACTXGC

SEQ ID NO: 6774 - protein, 17 aa, Artificial Sequence
  Synthetically generated peptide
  VARIANT (1)..(17): Xaa = Any Amino Acid
ACELXXCANXPACTGXC

SEQ ID NO: 6775 - protein, 16 aa, Artificial Sequence
  Synthetically generated peptide
  VARIANT (1)..(16): Xaa = Any Amino Acid
ACELXXCANPXACTGC

SEQ ID NO: 6776 - protein, 17 aa, Artificial Sequence
  Synthetically generated peptide
  VARIANT (1)..(17): Xaa = Any Amino Acid
ACELXXCANPXXACTGC

SEQ ID NO: 6777 - protein, 17 aa, Artificial Sequence
  Synthetically generated peptide
  VARIANT (1)..(17): Xaa = Any Amino Acid
ACELXXCANPXAXCTGC

SEQ ID NO: 6778 - protein, 17 aa, Artificial Sequence
  Synthetically generated peptide
  VARIANT (1)..(17): Xaa = Any Amino Acid
ACELXXCANPXACXTGC

SEQ ID NO: 6779 - protein, 17 aa, Artificial Sequence
  Synthetically generated peptide
  VARIANT (1)..(17): Xaa = Any Amino Acid
ACELXXCANPXACTXGC

SEQ ID NO: 6780 - protein, 17 aa, Artificial Sequence
  Synthetically generated peptide
  VARIANT (1)..(17): Xaa = Any Amino Acid
ACELXXCANPXACTGXC

SEQ ID NO: 6781 - protein, 16 aa, Artificial Sequence
  Synthetically generated peptide
  VARIANT (1)..(16): Xaa = Any Amino Acid
ACELXXCANPAXCTGC

SEQ ID NO: 6782 - protein, 17 aa, Artificial Sequence
  Synthetically generated peptide
  VARIANT (1)..(17): Xaa = Any Amino Acid
ACELXXCANPAXXCTGC

SEQ ID NO: 6783 - protein, 17 aa, Artificial Sequence
  Synthetically generated peptide
  VARIANT (1)..(17): Xaa = Any Amino Acid
ACELXXCANPAXCXTGC

SEQ ID NO: 6784 - protein, 17 aa, Artificial Sequence
  Synthetically generated peptide
  VARIANT (1)..(17): Xaa = Any Amino Acid
ACELXXCANPAXCTXGC

SEQ ID NO: 6785 - protein, 17 aa, Artificial Sequence
  Synthetically generated peptide
  VARIANT (1)..(17): Xaa = Any Amino Acid
ACELXXCANPAXCTGXC

SEQ ID NO: 6786 - protein, 16 aa, Artificial Sequence
  Synthetically generated peptide
  VARIANT (1)..(16): Xaa = Any Amino Acid
ACELXXCANPACXTGC

SEQ ID NO: 6787 - protein, 17 aa, Artificial Sequence
  Synthetically generated peptide
  VARIANT (1)..(17): Xaa = Any Amino Acid
ACELXXCANPACXXTGC

SEQ ID NO: 6788 - protein, 17 aa, Artificial Sequence
  Synthetically generated peptide
  VARIANT (1)..(17): Xaa = Any Amino Acid
ACELXXCANPACXTXGC

SEQ ID NO: 6789 - protein, 17 aa, Artificial Sequence
  Synthetically generated peptide
  VARIANT (1)..(17): Xaa = Any Amino Acid
ACELXXCANPACXTGXC

SEQ ID NO: 6790 - protein, 16 aa, Artificial Sequence
  Synthetically generated peptide
  VARIANT (1)..(16): Xaa = Any Amino Acid
ACELXXCANPACTXGC

SEQ ID NO: 6791 - protein, 17 aa, Artificial Sequence
  Synthetically generated peptide
  VARIANT (1)..(17): Xaa = Any Amino Acid
ACELXXCANPACTXXGC

SEQ ID NO: 6792 - protein, 17 aa, Artificial Sequence
  Synthetically generated peptide
  VARIANT (1)..(17): Xaa = Any Amino Acid
ACELXXCANPACTXGXC

SEQ ID NO: 6793 - protein, 16 aa, Artificial Sequence
  Synthetically generated peptide
  VARIANT (1)..(16): Xaa = Any Amino Acid
ACELXXCANPACTGXC

SEQ ID NO: 6794 - protein, 17 aa, Artificial Sequence
  Synthetically generated peptide
  VARIANT (1)..(17): Xaa = Any Amino Acid
ACELXXCANPACTGXXC

SEQ ID NO: 6795 - protein, 15 aa, Artificial Sequence
  Synthetically generated peptide
  VARIANT (1)..(15): Xaa = Any Amino Acid
ACELXCAXNPACTGC

SEQ ID NO: 6796 - protein, 16 aa, Artificial Sequence
  Synthetically generated peptide
  VARIANT (1)..(16): Xaa = Any Amino Acid
ACELXCAXXNPACTGC

SEQ ID NO: 6797 - protein, 17 aa, Artificial Sequence
  Synthetically generated peptide
  VARIANT (1)..(17): Xaa = Any Amino Acid
ACELXCAXXXNPACTGC

SEQ ID NO: 6798 - protein, 17 aa, Artificial Sequence
  Synthetically generated peptide
  VARIANT (1)..(17): Xaa = Any Amino Acid
ACELXCAXXNXPACTGC

SEQ ID NO: 6799 - protein, 17 aa, Artificial Sequence
  Synthetically generated peptide
  VARIANT (1)..(17): Xaa = Any Amino Acid
ACELXCAXXNPXACTGC

SEQ ID NO: 6800 - protein, 17 aa, Artificial Sequence
  Synthetically generated peptide
  VARIANT (1)..(17): Xaa = Any Amino Acid
ACELXCAXXNPAXCTGC

SEQ ID NO: 6801 - protein, 17 aa, Artificial Sequence
  Synthetically generated peptide
  VARIANT (1)..(17): Xaa = Any Amino Acid
ACELXCAXXNPACXTGC

SEQ ID NO: 6802 - protein, 17 aa, Artificial Sequence
  Synthetically generated peptide
  VARIANT (1)..(17): Xaa = Any Amino Acid
ACELXCAXXNPACTXGC

SEQ ID NO: 6803 - protein, 17 aa, Artificial Sequence
  Synthetically generated peptide
  VARIANT (1)..(17): Xaa = Any Amino Acid
ACELXCAXXNPACTGXC

SEQ ID NO: 6804 - protein, 16 aa, Artificial Sequence
  Synthetically generated peptide
  VARIANT (1)..(16): Xaa = Any Amino Acid
ACELXCAXNXPACTGC

SEQ ID NO: 6805 - protein, 17 aa, Artificial Sequence
  Synthetically generated peptide
  VARIANT (1)..(17): Xaa = Any Amino Acid
ACELXCAXNXXPACTGC

SEQ ID NO: 6806 - protein, 17 aa, Artificial Sequence
  Synthetically generated peptide
  VARIANT (1)..(17): Xaa = Any Amino Acid
ACELXCAXNXPXACTGC

SEQ ID NO: 6807 - protein, 17 aa, Artificial Sequence
  Synthetically generated peptide
  VARIANT (1)..(17): Xaa = Any Amino Acid
ACELXCAXNXPAXCTGC

SEQ ID NO: 6808 - protein, 17 aa, Artificial Sequence
  Synthetically generated peptide
  VARIANT (1)..(17): Xaa = Any Amino Acid
ACELXCAXNXPACXTGC

SEQ ID NO: 6809 - protein, 17 aa, Artificial Sequence
  Synthetically generated peptide
  VARIANT (1)..(17): Xaa = Any Amino Acid
ACELXCAXNXPACTXGC

SEQ ID NO: 6810 - protein, 17 aa, Artificial Sequence
  Synthetically generated peptide
  VARIANT (1)..(17): Xaa = Any Amino Acid
ACELXCAXNXPACTGXC

SEQ ID NO: 6811 - protein, 16 aa, Artificial Sequence
  Synthetically generated peptide
  VARIANT (1)..(16): Xaa = Any Amino Acid
ACELXCAXNPXACTGC

SEQ ID NO: 6812 - protein, 17 aa, Artificial Sequence
  Synthetically generated peptide
  VARIANT (1)..(17): Xaa = Any Amino Acid
ACELXCAXNPXXACTGC

SEQ ID NO: 6813 - protein, 17 aa, Artificial Sequence
  Synthetically generated peptide
  VARIANT (1)..(17): Xaa = Any Amino Acid
ACELXCAXNPXAXCTGC

SEQ ID NO: 6814 - protein, 17 aa, Artificial Sequence
  Synthetically generated peptide
  VARIANT (1)..(17): Xaa = Any Amino Acid
ACELXCAXNPXACXTGC

SEQ ID NO: 6815 - protein, 17 aa, Artificial Sequence
  Synthetically generated peptide
  VARIANT (1)..(17): Xaa = Any Amino Acid
ACELXCAXNPXACTXGC

SEQ ID NO: 6816 - protein, 17 aa, Artificial Sequence
  Synthetically generated peptide
  VARIANT (1)..(17): Xaa = Any Amino Acid
ACELXCAXNPXACTGXC

SEQ ID NO: 6817 - protein, 16 aa, Artificial Sequence
  Synthetically generated peptide
  VARIANT (1)..(16): Xaa = Any Amino Acid
ACELXCAXNPAXCTGC

SEQ ID NO: 6818 - protein, 17 aa, Artificial Sequence
  Synthetically generated peptide
  VARIANT (1)..(17): Xaa = Any Amino Acid
ACELXCAXNPAXXCTGC

SEQ ID NO: 6819 - protein, 17 aa, Artificial Sequence
  Synthetically generated peptide
  VARIANT (1)..(17): Xaa = Any Amino Acid
ACELXCAXNPAXCXTGC

SEQ ID NO: 6820 - protein, 17 aa, Artificial Sequence
  Synthetically generated peptide
  VARIANT (1)..(17): Xaa = Any Amino Acid
ACELXCAXNPAXCTXGC

SEQ ID NO: 6821 - protein, 17 aa, Artificial Sequence
  Synthetically generated peptide
  VARIANT (1)..(17): Xaa = Any Amino Acid
ACELXCAXNPAXCTGXC

SEQ ID NO: 6822 - protein, 16 aa, Artificial Sequence
  Synthetically generated peptide
  VARIANT (1)..(16): Xaa = Any Amino Acid
ACELXCAXNPACXTGC

SEQ ID NO: 6823 - protein, 17 aa, Artificial Sequence
  Synthetically generated peptide
  VARIANT (1)..(17): Xaa = Any Amino Acid
ACELXCAXNPACXXTGC

SEQ ID NO: 6824 - protein, 17 aa, Artificial Sequence
  Synthetically generated peptide
  VARIANT (1)..(17): Xaa = Any Amino Acid
ACELXCAXNPACXTXGC

SEQ ID NO: 6825 - protein, 17 aa, Artificial Sequence
  Synthetically generated peptide
  VARIANT (1)..(17): Xaa = Any Amino Acid
ACELXCAXNPACXTGXC

SEQ ID NO: 6826 - protein, 16 aa, Artificial Sequence
  Synthetically generated peptide
  VARIANT (1)..(16): Xaa = Any Amino Acid
ACELXCAXNPACTXGC

SEQ ID NO: 6827 - protein, 17 aa, Artificial Sequence
  Synthetically generated peptide
  VARIANT (1)..(17): Xaa = Any Amino Acid
ACELXCAXNPACTXXGC

SEQ ID NO: 6828 - protein, 17 aa, Artificial Sequence
  Synthetically generated peptide
  VARIANT (1)..(17): Xaa = Any Amino Acid
ACELXCAXNPACTXGXC

SEQ ID NO: 6829 - protein, 16 aa, Artificial Sequence
  Synthetically generated peptide
  VARIANT (1)..(16): Xaa = Any Amino Acid
ACELXCAXNPACTGXC

SEQ ID NO: 6830 - protein, 17 aa, Artificial Sequence
  Synthetically generated peptide
  VARIANT (1)..(17): Xaa = Any Amino Acid
ACELXCAXNPACTGXXC

SEQ ID NO: 6831 - protein, 15 aa, Artificial Sequence
  Synthetically generated peptide
  VARIANT (1)..(15): Xaa = Any Amino Acid
ACELXCANXPACTGC

SEQ ID NO: 6832 - protein, 16 aa, Artificial Sequence
  Synthetically generated peptide
  VARIANT (1)..(16): Xaa = Any Amino Acid
ACELXCANXXPACTGC

SEQ ID NO: 6833 - protein, 17 aa, Artificial Sequence
  Synthetically generated peptide
  VARIANT (1)..(17): Xaa = Any Amino Acid
ACELXCANXXXPACTGC

SEQ ID NO: 6834 - protein, 17 aa, Artificial Sequence
  Synthetically generated peptide
  VARIANT (1)..(17): Xaa = Any Amino Acid
ACELXCANXXPXACTGC

SEQ ID NO: 6835 - protein, 17 aa, Artificial Sequence
  Synthetically generated peptide
  VARIANT (1)..(17): Xaa = Any Amino Acid
ACELXCANXXPAXCTGC

SEQ ID NO: 6836 - protein, 17 aa, Artificial Sequence
  Synthetically generated peptide
  VARIANT (1)..(17): Xaa = Any Amino Acid
ACELXCANXXPACXTGC

SEQ ID NO: 6837 - protein, 17 aa, Artificial Sequence
  Synthetically generated peptide
  VARIANT (1)..(17): Xaa = Any Amino Acid
ACELXCANXXPACTXGC

SEQ ID NO: 6838 - protein, 17 aa, Artificial Sequence
  Synthetically generated peptide
  VARIANT (1)..(17): Xaa = Any Amino Acid
ACELXCANXXPACTGXC

SEQ ID NO: 6839 - protein, 16 aa, Artificial Sequence
  Synthetically generated peptide
  VARIANT (1)..(16): Xaa = Any Amino Acid
ACELXCANXPXACTGC

SEQ ID NO: 6840 - protein, 17 aa, Artificial Sequence
  Synthetically generated peptide
  VARIANT (1)..(17): Xaa = Any Amino Acid
ACELXCANXPXXACTGC

SEQ ID NO: 6841 - protein, 17 aa, Artificial Sequence
  Synthetically generated peptide
  VARIANT (1)..(17): Xaa = Any Amino Acid
ACELXCANXPXAXCTGC

SEQ ID NO: 6842 - protein, 17 aa, Artificial Sequence
  Synthetically generated peptide
  VARIANT (1)..(17): Xaa = Any Amino Acid
ACELXCANXPXACXTGC

SEQ ID NO: 6843 - protein, 17 aa, Artificial Sequence
  Synthetically generated peptide
  VARIANT (1)..(17): Xaa = Any Amino Acid
ACELXCANXPXACTXGC

SEQ ID NO: 6844 - protein, 17 aa, Artificial Sequence
  Synthetically generated peptide
  VARIANT (1)..(17): Xaa = Any Amino Acid
ACELXCANXPXACTGXC

SEQ ID NO: 6845 - protein, 16 aa, Artificial Sequence
  Synthetically generated peptide
  VARIANT (1)..(16): Xaa = Any Amino Acid
ACELXCANXPAXCTGC

SEQ ID NO: 6846 - protein, 17 aa, Artificial Sequence
  Synthetically generated peptide
  VARIANT (1)..(17): Xaa = Any Amino Acid
ACELXCANXPAXXCTGC

SEQ ID NO: 6847 - protein, 17 aa, Artificial Sequence
  Synthetically generated peptide
  VARIANT (1)..(17): Xaa = Any Amino Acid
ACELXCANXPAXCXTGC

SEQ ID NO: 6848 - protein, 17 aa, Artificial Sequence
  Synthetically generated peptide
  VARIANT (1)..(17): Xaa = Any Amino Acid
ACELXCANXPAXCTXGC

SEQ ID NO: 6849 - protein, 17 aa, Artificial Sequence
  Synthetically generated peptide
  VARIANT (1)..(17): Xaa = Any Amino Acid
ACELXCANXPAXCTGXC

SEQ ID NO: 6850 - protein, 16 aa, Artificial Sequence
  Synthetically generated peptide
  VARIANT (1)..(16): Xaa = Any Amino Acid
ACELXCANXPACXTGC

SEQ ID NO: 6851 - protein, 17 aa, Artificial Sequence
  Synthetically generated peptide
  VARIANT (1)..(17): Xaa = Any Amino Acid
ACELXCANXPACXXTGC

SEQ ID NO: 6852 - protein, 17 aa, Artificial Sequence
  Synthetically generated peptide
  VARIANT (1)..(17): Xaa = Any Amino Acid
ACELXCANXPACXTXGC

SEQ ID NO: 6853 - protein, 17 aa, Artificial Sequence
  Synthetically generated peptide
  VARIANT (1)..(17): Xaa = Any Amino Acid
ACELXCANXPACXTGXC

SEQ ID NO: 6854 - protein, 16 aa, Artificial Sequence
  Synthetically generated peptide
  VARIANT (1)..(16): Xaa = Any Amino Acid
ACELXCANXPACTXGC

SEQ ID NO: 6855 - protein, 17 aa, Artificial Sequence
  Synthetically generated peptide
  VARIANT (1)..(17): Xaa = Any Amino Acid
ACELXCANXPACTXXGC

SEQ ID NO: 6856 - protein, 17 aa, Artificial Sequence
  Synthetically generated peptide
  VARIANT (1)..(17): Xaa = Any Amino Acid
ACELXCANXPACTXGXC

SEQ ID NO: 6857 - protein, 16 aa, Artificial Sequence
  Synthetically generated peptide
  VARIANT (1)..(16): Xaa = Any Amino Acid
ACELXCANXPACTGXC

SEQ ID NO: 6858 - protein, 17 aa, Artificial Sequence
  Synthetically generated peptide
  VARIANT (1)..(17): Xaa = Any Amino Acid
ACELXCANXPACTGXXC

SEQ ID NO: 6859 - protein, 15 aa, Artificial Sequence
  Synthetically generated peptide
  VARIANT (1)..(15): Xaa = Any Amino Acid
ACELXCANPXACTGC

SEQ ID NO: 6860 - protein, 16 aa, Artificial Sequence
  Synthetically generated peptide
  VARIANT (1)..(16): Xaa = Any Amino Acid
ACELXCANPXXACTGC

SEQ ID NO: 6861 - protein, 17 aa, Artificial Sequence
  Synthetically generated peptide
  VARIANT (1)..(17): Xaa = Any Amino Acid
ACELXCANPXXXACTGC

SEQ ID NO: 6862 - protein, 17 aa, Artificial Sequence
  Synthetically generated peptide
  VARIANT (1)..(17): Xaa = Any Amino Acid
ACELXCANPXXAXCTGC

SEQ ID NO: 6863 - protein, 17 aa, Artificial Sequence
  Synthetically generated peptide
  VARIANT (1)..(17): Xaa = Any Amino Acid
ACELXCANPXXACXTGC

SEQ ID NO: 6864 - protein, 17 aa, Artificial Sequence
  Synthetically generated peptide
  VARIANT (1)..(17): Xaa = Any Amino Acid
ACELXCANPXXACTXGC

SEQ ID NO: 6865 - protein, 17 aa, Artificial Sequence
  Synthetically generated peptide
  VARIANT (1)..(17): Xaa = Any Amino Acid
ACELXCANPXXACTGXC

SEQ ID NO: 6866 - protein, 16 aa, Artificial Sequence
  Synthetically generated peptide
  VARIANT (1)..(16): Xaa = Any Amino Acid
ACELXCANPXAXCTGC

SEQ ID NO: 6867 - protein, 17 aa, Artificial Sequence
  Synthetically generated peptide
  VARIANT (1)..(17): Xaa = Any Amino Acid
ACELXCANPXAXXCTGC

SEQ ID NO: 6868 - protein, 17 aa, Artificial Sequence
  Synthetically generated peptide
  VARIANT (1)..(17): Xaa = Any Amino Acid
ACELXCANPXAXCXTGC

SEQ ID NO: 6869 - protein, 17 aa, Artificial Sequence
  Synthetically generated peptide
  VARIANT (1)..(17): Xaa = Any Amino Acid
ACELXCANPXAXCTXGC

SEQ ID NO: 6870 - protein, 17 aa, Artificial Sequence
  Synthetically generated peptide
  VARIANT (1)..(17): Xaa = Any Amino Acid
ACELXCANPXAXCTGXC

SEQ ID NO: 6871 - protein, 16 aa, Artificial Sequence
  Synthetically generated peptide
  VARIANT (1)..(16): Xaa = Any Amino Acid
ACELXCANPXACXTGC

SEQ ID NO: 6872 - protein, 17 aa, Artificial Sequence
  Synthetically generated peptide
  VARIANT (1)..(17): Xaa = Any Amino Acid
ACELXCANPXACXXTGC

SEQ ID NO: 6873 - protein, 17 aa, Artificial Sequence
  Synthetically generated peptide
  VARIANT (1)..(17): Xaa = Any Amino Acid
ACELXCANPXACXTXGC

SEQ ID NO: 6874 - protein, 17 aa, Artificial Sequence
  Synthetically generated peptide
  VARIANT (1)..(17): Xaa = Any Amino Acid
ACELXCANPXACXTGXC

SEQ ID NO: 6875 - protein, 16 aa, Artificial Sequence
  Synthetically generated peptide
  VARIANT (1)..(16): Xaa = Any Amino Acid
ACELXCANPXACTXGC

SEQ ID NO: 6876 - protein, 17 aa, Artificial Sequence
  Synthetically generated peptide
  VARIANT (1)..(17): Xaa = Any Amino Acid
ACELXCANPXACTXXGC

SEQ ID NO: 6877 - protein, 17 aa, Artificial Sequence
  Synthetically generated peptide
  VARIANT (1)..(17): Xaa = Any Amino Acid
ACELXCANPXACTXGXC

SEQ ID NO: 6878 - protein, 16 aa, Artificial Sequence
  Synthetically generated peptide
  VARIANT (1)..(16): Xaa = Any Amino Acid
ACELXCANPXACTGXC

SEQ ID NO: 6879 - protein, 17 aa, Artificial Sequence
  Synthetically generated peptide
  VARIANT (1)..(17): Xaa = Any Amino Acid
ACELXCANPXACTGXXC

SEQ ID NO: 6880 - protein, 15 aa, Artificial Sequence
  Synthetically generated peptide
  VARIANT (1)..(15): Xaa = Any Amino Acid
ACELXCANPAXCTGC

SEQ ID NO: 6881 - protein, 16 aa, Artificial Sequence
  Synthetically generated peptide
  VARIANT (1)..(16): Xaa = Any Amino Acid
ACELXCANPAXXCTGC

SEQ ID NO: 6882 - protein, 17 aa, Artificial Sequence
  Synthetically generated peptide
  VARIANT (1)..(17): Xaa = Any Amino Acid
ACELXCANPAXXXCTGC

SEQ ID NO: 6883 - protein, 17 aa, Artificial Sequence
  Synthetically generated peptide
  VARIANT (1)..(17): Xaa = Any Amino Acid
ACELXCANPAXXCXTGC

SEQ ID NO: 6884 - protein, 17 aa, Artificial Sequence
  Synthetically generated peptide
  VARIANT (1)..(17): Xaa = Any Amino Acid
ACELXCANPAXXCTXGC

SEQ ID NO: 6885 - protein, 17 aa, Artificial Sequence
  Synthetically generated peptide
  VARIANT (1)..(17): Xaa = Any Amino Acid
ACELXCANPAXXCTGXC

SEQ ID NO: 6886 - protein, 16 aa, Artificial Sequence
  Synthetically generated peptide
  VARIANT (1)..(16): Xaa = Any Amino Acid
ACELXCANPAXCXTGC

SEQ ID NO: 6887 - protein, 17 aa, Artificial Sequence
  Synthetically generated peptide
  VARIANT (1)..(17): Xaa = Any Amino Acid
ACELXCANPAXCXXTGC

SEQ ID NO: 6888 - protein, 17 aa, Artificial Sequence
  Synthetically generated peptide
  VARIANT (1)..(17): Xaa = Any Amino Acid
ACELXCANPAXCXTXGC

SEQ ID NO: 6889 - protein, 17 aa, Artificial Sequence
  Synthetically generated peptide
  VARIANT (1)..(17): Xaa = Any Amino Acid
ACELXCANPAXCXTGXC

SEQ ID NO: 6890 - protein, 16 aa, Artificial Sequence
  Synthetically generated peptide
  VARIANT (1)..(16): Xaa = Any Amino Acid
ACELXCANPAXCTXGC

SEQ ID NO: 6891 - protein, 17 aa, Artificial Sequence
  Synthetically generated peptide
  VARIANT (1)..(17): Xaa = Any Amino Acid
ACELXCANPAXCTXXGC

SEQ ID NO: 6892 - protein, 17 aa, Artificial Sequence
  Synthetically generated peptide
  VARIANT (1)..(17): Xaa = Any Amino Acid
ACELXCANPAXCTXGXC

SEQ ID NO: 6893 - protein, 16 aa, Artificial Sequence
  Synthetically generated peptide
  VARIANT (1)..(16): Xaa = Any Amino Acid
ACELXCANPAXCTGXC

SEQ ID NO: 6894 - protein, 17 aa, Artificial Sequence
  Synthetically generated peptide
  VARIANT (1)..(17): Xaa = Any Amino Acid
ACELXCANPAXCTGXXC

SEQ ID NO: 6895 - protein, 15 aa, Artificial Sequence
  Synthetically generated peptide
  VARIANT (1)..(15): Xaa = Any Amino Acid
ACELXCANPACXTGC

SEQ ID NO: 6896 - protein, 16 aa, Artificial Sequence
  Synthetically generated peptide
  VARIANT (1)..(16): Xaa = Any Amino Acid
ACELXCANPACXXTGC

SEQ ID NO: 6897 - protein, 17 aa, Artificial Sequence
  Synthetically generated peptide
  VARIANT (1)..(17): Xaa = Any Amino Acid
ACELXCANPACXXXTGC

SEQ ID NO: 6898 - protein, 17 aa, Artificial Sequence
  Synthetically generated peptide
  VARIANT (1)..(17): Xaa = Any Amino Acid
ACELXCANPACXXTXGC

SEQ ID NO: 6899 - protein, 17 aa, Artificial Sequence
  Synthetically generated peptide
  VARIANT (1)..(17): Xaa = Any Amino Acid
ACELXCANPACXXTGXC

SEQ ID NO: 6900 - protein, 16 aa, Artificial Sequence
  Synthetically generated peptide
  VARIANT (1)..(16): Xaa = Any Amino Acid
ACELXCANPACXTXGC

SEQ ID NO: 6901 - protein, 17 aa, Artificial Sequence
  Synthetically generated peptide
  VARIANT (1)..(17): Xaa = Any Amino Acid
ACELXCANPACXTXXGC

SEQ ID NO: 6902 - protein, 17 aa, Artificial Sequence
  Synthetically generated peptide
  VARIANT (1)..(17): Xaa = Any Amino Acid
ACELXCANPACXTXGXC

SEQ ID NO: 6903 - protein, 16 aa, Artificial Sequence
  Synthetically generated peptide
  VARIANT (1)..(16): Xaa = Any Amino Acid
ACELXCANPACXTGXC

SEQ ID NO: 6904 - protein, 17 aa, Artificial Sequence
  Synthetically generated peptide
  VARIANT (1)..(17): Xaa = Any Amino Acid
ACELXCANPACXTGXXC

SEQ ID NO: 6905 - protein, 15 aa, Artificial Sequence
  Synthetically generated peptide
  VARIANT (1)..(15): Xaa = Any Amino Acid
ACELXCANPACTXGC

SEQ ID NO: 6906 - protein, 16 aa, Artificial Sequence
  Synthetically generated peptide
  VARIANT (1)..(16): Xaa = Any Amino Acid
ACELXCANPACTXXGC

SEQ ID NO: 6907 - protein, 17 aa, Artificial Sequence
  Synthetically generated peptide
  VARIANT (1)..(17): Xaa = Any Amino Acid
ACELXCANPACTXXXGC

SEQ ID NO: 6908 - protein, 17 aa, Artificial Sequence
  Synthetically generated peptide
  VARIANT (1)..(17): Xaa = Any Amino Acid
ACELXCANPACTXXGXC

SEQ ID NO: 6909 - protein, 16 aa, Artificial Sequence
  Synthetically generated peptide
  VARIANT (1)..(16): Xaa = Any Amino Acid
ACELXCANPACTXGXC

SEQ ID NO: 6910 - protein, 17 aa, Artificial Sequence
  Synthetically generated peptide
  VARIANT (1)..(17): Xaa = Any Amino Acid
ACELXCANPACTXGXXC

SEQ ID NO: 6911 - protein, 15 aa, Artificial Sequence
  Synthetically generated peptide
  VARIANT (1)..(15): Xaa = Any Amino Acid
ACELXCANPACTGXC

SEQ ID NO: 6912 - protein, 16 aa, Artificial Sequence
  Synthetically generated peptide
  VARIANT (1)..(16): Xaa = Any Amino Acid
ACELXCANPACTGXXC

SEQ ID NO: 6913 - protein, 17 aa, Artificial Sequence
  Synthetically generated peptide
  VARIANT (1)..(17): Xaa = Any Amino Acid
ACELXCANPACTGXXXC

SEQ ID NO: 6914 - protein, 14 aa, Artificial Sequence
  Synthetically generated peptide
  VARIANT (1)..(14): Xaa = Any Amino Acid
ACELCAXNPACTGC

SEQ ID NO: 6915 - protein, 15 aa, Artificial Sequence
  Synthetically generated peptide
  VARIANT (1)..(15): Xaa = Any Amino Acid
ACELCAXXNPACTGC

SEQ ID NO: 6916 - protein, 16 aa, Artificial Sequence
  Synthetically generated peptide
  VARIANT (1)..(16): Xaa = Any Amino Acid
ACELCAXXXNPACTGC

SEQ ID NO: 6917 - protein, 17 aa, Artificial Sequence
  Synthetically generated peptide
  VARIANT (1)..(17): Xaa = Any Amino Acid
ACELCAXXXXNPACTGC

SEQ ID NO: 6918 - protein, 17 aa, Artificial Sequence
  Synthetically generated peptide
  VARIANT (1)..(17): Xaa = Any Amino Acid
ACELCAXXXNXPACTGC

SEQ ID NO: 6919 - protein, 17 aa, Artificial Sequence
  Synthetically generated peptide
  VARIANT (1)..(17): Xaa = Any Amino Acid
ACELCAXXXNPXACTGC

SEQ ID NO: 6920 - protein, 17 aa, Artificial Sequence
  Synthetically generated peptide
  VARIANT (1)..(17): Xaa = Any Amino Acid
ACELCAXXXNPAXCTGC

SEQ ID NO: 6921 - protein, 17 aa, Artificial Sequence
  Synthetically generated peptide
  VARIANT (1)..(17): Xaa = Any Amino Acid
ACELCAXXXNPACXTGC

SEQ ID NO: 6922 - protein, 17 aa, Artificial Sequence
  Synthetically generated peptide
  VARIANT (1)..(17): Xaa = Any Amino Acid
ACELCAXXXNPACTXGC

SEQ ID NO: 6923 - protein, 17 aa, Artificial Sequence
  Synthetically generated peptide
  VARIANT (1)..(17): Xaa = Any Amino Acid
ACELCAXXXNPACTGXC

SEQ ID NO: 6924 - protein, 16 aa, Artificial Sequence
  Synthetically generated peptide
  VARIANT (1)..(16): Xaa = Any Amino Acid
ACELCAXXNXPACTGC

SEQ ID NO: 6925 - protein, 17 aa, Artificial Sequence
  Synthetically generated peptide
  VARIANT (1)..(17): Xaa = Any Amino Acid
ACELCAXXNXXPACTGC

SEQ ID NO: 6926 - protein, 17 aa, Artificial Sequence
  Synthetically generated peptide
  VARIANT (1)..(17): Xaa = Any Amino Acid
ACELCAXXNXPXACTGC

SEQ ID NO: 6927 - protein, 17 aa, Artificial Sequence
  Synthetically generated peptide
  VARIANT (1)..(17): Xaa = Any Amino Acid
ACELCAXXNXPAXCTGC

SEQ ID NO: 6928 - protein, 17 aa, Artificial Sequence
  Synthetically generated peptide
  VARIANT (1)..(17): Xaa = Any Amino Acid
ACELCAXXNXPACXTGC

SEQ ID NO: 6929 - protein, 17 aa, Artificial Sequence
  Synthetically generated peptide
  VARIANT (1)..(17): Xaa = Any Amino Acid
ACELCAXXNXPACTXGC

SEQ ID NO: 6930 - protein, 17 aa, Artificial Sequence
  Synthetically generated peptide
  VARIANT (1)..(17): Xaa = Any Amino Acid
ACELCAXXNXPACTGXC

SEQ ID NO: 6931 - protein, 16 aa, Artificial Sequence
  Synthetically generated peptide
  VARIANT (1)..(16): Xaa = Any Amino Acid
ACELCAXXNPXACTGC

SEQ ID NO: 6932 - protein, 17 aa, Artificial Sequence
  Synthetically generated peptide
  VARIANT (1)..(17): Xaa = Any Amino Acid
ACELCAXXNPXXACTGC

SEQ ID NO: 6933 - protein, 17 aa, Artificial Sequence
  Synthetically generated peptide
  VARIANT (1)..(17): Xaa = Any Amino Acid
ACELCAXXNPXAXCTGC

SEQ ID NO: 6934 - protein, 17 aa, Artificial Sequence
  Synthetically generated peptide
  VARIANT (1)..(17): Xaa = Any Amino Acid
ACELCAXXNPXACXTGC

SEQ ID NO: 6935 - protein, 17 aa, Artificial Sequence
  Synthetically generated peptide
  VARIANT (1)..(17): Xaa = Any Amino Acid
ACELCAXXNPXACTXGC

SEQ ID NO: 6936 - protein, 17 aa, Artificial Sequence
  Synthetically generated peptide
  VARIANT (1)..(17): Xaa = Any Amino Acid
ACELCAXXNPXACTGXC

SEQ ID NO: 6937 - protein, 16 aa, Artificial Sequence
  Synthetically generated peptide
  VARIANT (1)..(16): Xaa = Any Amino Acid
ACELCAXXNPAXCTGC

SEQ ID NO: 6938 - protein, 17 aa, Artificial Sequence
  Synthetically generated peptide
  VARIANT (1)..(17): Xaa = Any Amino Acid
ACELCAXXNPAXXCTGC

SEQ ID NO: 6939 - protein, 17 aa, Artificial Sequence
  Synthetically generated peptide
  VARIANT (1)..(17): Xaa = Any Amino Acid
ACELCAXXNPAXCXTGC

SEQ ID NO: 6940 - protein, 17 aa, Artificial Sequence
  Synthetically generated peptide
  VARIANT (1)..(17): Xaa = Any Amino Acid
ACELCAXXNPAXCTXGC

SEQ ID NO: 6941 - protein, 17 aa, Artificial Sequence
  Synthetically generated peptide
  VARIANT (1)..(17): Xaa = Any Amino Acid
ACELCAXXNPAXCTGXC

SEQ ID NO: 6942 - protein, 16 aa, Artificial Sequence
  Synthetically generated peptide
  VARIANT (1)..(16): Xaa = Any Amino Acid
ACELCAXXNPACXTGC

SEQ ID NO: 6943 - protein, 17 aa, Artificial Sequence
  Synthetically generated peptide
  VARIANT (1)..(17): Xaa = Any Amino Acid
ACELCAXXNPACXXTGC

SEQ ID NO: 6944 - protein, 17 aa, Artificial Sequence
  Synthetically generated peptide
  VARIANT (1)..(17): Xaa = Any Amino Acid
ACELCAXXNPACXTXGC

SEQ ID NO: 6945 - protein, 17 aa, Artificial Sequence
  Synthetically generated peptide
  VARIANT (1)..(17): Xaa = Any Amino Acid
ACELCAXXNPACXTGXC

SEQ ID NO: 6946 - protein, 16 aa, Artificial Sequence
  Synthetically generated peptide
  VARIANT (1)..(16): Xaa = Any Amino Acid
ACELCAXXNPACTXGC

SEQ ID NO: 6947 - protein, 17 aa, Artificial Sequence
  Synthetically generated peptide
  VARIANT (1)..(17): Xaa = Any Amino Acid
ACELCAXXNPACTXXGC

SEQ ID NO: 6948 - protein, 17 aa, Artificial Sequence
  Synthetically generated peptide
  VARIANT (1)..(17): Xaa = Any Amino Acid
ACELCAXXNPACTXGXC

SEQ ID NO: 6949 - protein, 16 aa, Artificial Sequence
  Synthetically generated peptide
  VARIANT (1)..(16): Xaa = Any Amino Acid
ACELCAXXNPACTGXC

SEQ ID NO: 6950 - protein, 17 aa, Artificial Sequence
  Synthetically generated peptide
  VARIANT (1)..(17): Xaa = Any Amino Acid
ACELCAXXNPACTGXXC

SEQ ID NO: 6951 - protein, 15 aa, Artificial Sequence
  Synthetically generated peptide
  VARIANT (1)..(15): Xaa = Any Amino Acid
ACELCAXNXPACTGC

SEQ ID NO: 6952 - protein, 16 aa, Artificial Sequence
  Synthetically generated peptide
  VARIANT (1)..(16): Xaa = Any Amino Acid
ACELCAXNXXPACTGC

SEQ ID NO: 6953 - protein, 17 aa, Artificial Sequence
  Synthetically generated peptide
  VARIANT (1)..(17): Xaa = Any Amino Acid
ACELCAXNXXXPACTGC

SEQ ID NO: 6954 - protein, 17 aa, Artificial Sequence
  Synthetically generated peptide
  VARIANT (1)..(17): Xaa = Any Amino Acid
ACELCAXNXXPXACTGC

SEQ ID NO: 6955 - protein, 17 aa, Artificial Sequence
  Synthetically generated peptide
  VARIANT (1)..(17): Xaa = Any Amino Acid
ACELCAXNXXPAXCTGC

SEQ ID NO: 6956 - protein, 17 aa, Artificial Sequence
  Synthetically generated peptide
  VARIANT (1)..(17): Xaa = Any Amino Acid
ACELCAXNXXPACXTGC

SEQ ID NO: 6957 - protein, 17 aa, Artificial Sequence
  Synthetically generated peptide
  VARIANT (1)..(17): Xaa = Any Amino Acid
ACELCAXNXXPACTXGC

SEQ ID NO: 6958 - protein, 17 aa, Artificial Sequence
  Synthetically generated peptide
  VARIANT (1)..(17): Xaa = Any Amino Acid
ACELCAXNXXPACTGXC

SEQ ID NO: 6959 - protein, 16 aa, Artificial Sequence
  Synthetically generated peptide
  VARIANT (1)..(16): Xaa = Any Amino Acid
ACELCAXNXPXACTGC

SEQ ID NO: 6960 - protein, 17 aa, Artificial Sequence
  Synthetically generated peptide
  VARIANT (1)..(17): Xaa = Any Amino Acid
ACELCAXNXPXXACTGC

SEQ ID NO: 6961 - protein, 17 aa, Artificial Sequence
  Synthetically generated peptide
  VARIANT (1)..(17): Xaa = Any Amino Acid
ACELCAXNXPXAXCTGC

SEQ ID NO: 6962 - protein, 17 aa, Artificial Sequence
  Synthetically generated peptide
  VARIANT (1)..(17): Xaa = Any Amino Acid
ACELCAXNXPXACXTGC

SEQ ID NO: 6963 - protein, 17 aa, Artificial Sequence
  Synthetically generated peptide
  VARIANT (1)..(17): Xaa = Any Amino Acid
ACELCAXNXPXACTXGC

SEQ ID NO: 6964 - protein, 17 aa, Artificial Sequence
  Synthetically generated peptide
  VARIANT (1)..(17): Xaa = Any Amino Acid
ACELCAXNXPXACTGXC

SEQ ID NO: 6965 - protein, 16 aa, Artificial Sequence
  Synthetically generated peptide
  VARIANT (1)..(16): Xaa = Any Amino Acid
ACELCAXNXPAXCTGC

SEQ ID NO: 6966 - protein, 17 aa, Artificial Sequence
  Synthetically generated peptide
  VARIANT (1)..(17): Xaa = Any Amino Acid
ACELCAXNXPAXXCTGC

SEQ ID NO: 6967 - protein, 17 aa, Artificial Sequence
  Synthetically generated peptide
  VARIANT (1)..(17): Xaa = Any Amino Acid
ACELCAXNXPAXCXTGC

SEQ ID NO: 6968 - protein, 17 aa, Artificial Sequence
  Synthetically generated peptide
  VARIANT (1)..(17): Xaa = Any Amino Acid
ACELCAXNXPAXCTXGC

SEQ ID NO: 6969 - protein, 17 aa, Artificial Sequence
  Synthetically generated peptide
  VARIANT (1)..(17): Xaa = Any Amino Acid
ACELCAXNXPAXCTGXC

SEQ ID NO: 6970 - protein, 16 aa, Artificial Sequence
  Synthetically generated peptide
  VARIANT (1)..(16): Xaa = Any Amino Acid
ACELCAXNXPACXTGC

SEQ ID NO: 6971 - protein, 17 aa, Artificial Sequence
  Synthetically generated peptide
  VARIANT (1)..(17): Xaa = Any Amino Acid
ACELCAXNXPACXXTGC

SEQ ID NO: 6972 - protein, 17 aa, Artificial Sequence
  Synthetically generated peptide
  VARIANT (1)..(17): Xaa = Any Amino Acid
ACELCAXNXPACXTXGC

SEQ ID NO: 6973 - protein, 17 aa, Artificial Sequence
  Synthetically generated peptide
  VARIANT (1)..(17): Xaa = Any Amino Acid
ACELCAXNXPACXTGXC

SEQ ID NO: 6974 - protein, 16 aa, Artificial Sequence
  Synthetically generated peptide
  VARIANT (1)..(16): Xaa = Any Amino Acid
ACELCAXNXPACTXGC

SEQ ID NO: 6975 - protein, 17 aa, Artificial Sequence
  Synthetically generated peptide
  VARIANT (1)..(17): Xaa = Any Amino Acid
ACELCAXNXPACTXXGC

SEQ ID NO: 6976 - protein, 17 aa, Artificial Sequence
  Synthetically generated peptide
  VARIANT (1)..(17): Xaa = Any Amino Acid
ACELCAXNXPACTXGXC

SEQ ID NO: 6977 - protein, 16 aa, Artificial Sequence
  Synthetically generated peptide
  VARIANT (1)..(16): Xaa = Any Amino Acid
ACELCAXNXPACTGXC

SEQ ID NO: 6978 - protein, 17 aa, Artificial Sequence
  Synthetically generated peptide
  VARIANT (1)..(17): Xaa = Any Amino Acid
ACELCAXNXPACTGXXC

SEQ ID NO: 6979 - protein, 15 aa, Artificial Sequence
  Synthetically generated peptide
  VARIANT (1)..(15): Xaa = Any Amino Acid
ACELCAXNPXACTGC

SEQ ID NO: 6980 - protein, 16 aa, Artificial Sequence
  Synthetically generated peptide
  VARIANT (1)..(16): Xaa = Any Amino Acid
ACELCAXNPXXACTGC

SEQ ID NO: 6981 - protein, 17 aa, Artificial Sequence
  Synthetically generated peptide
  VARIANT (1)..(17): Xaa = Any Amino Acid
ACELCAXNPXXXACTGC

SEQ ID NO: 6982 - protein, 17 aa, Artificial Sequence
  Synthetically generated peptide
  VARIANT (1)..(17): Xaa = Any Amino Acid
ACELCAXNPXXAXCTGC

SEQ ID NO: 6983 - protein, 17 aa, Artificial Sequence
  Synthetically generated peptide
  VARIANT (1)..(17): Xaa = Any Amino Acid
ACELCAXNPXXACXTGC

SEQ ID NO: 6984 - protein, 17 aa, Artificial Sequence
  Synthetically generated peptide
  VARIANT (1)..(17): Xaa = Any Amino Acid
ACELCAXNPXXACTXGC

SEQ ID NO: 6985 - protein, 17 aa, Artificial Sequence
  Synthetically generated peptide
  VARIANT (1)..(17): Xaa = Any Amino Acid
ACELCAXNPXXACTGXC

SEQ ID NO: 6986 - protein, 16 aa, Artificial Sequence
  Synthetically generated peptide
  VARIANT (1)..(16): Xaa = Any Amino Acid
ACELCAXNPXAXCTGC

SEQ ID NO: 6987 - protein, 17 aa, Artificial Sequence
  Synthetically generated peptide
  VARIANT (1)..(17): Xaa = Any Amino Acid
ACELCAXNPXAXXCTGC

SEQ ID NO: 6988 - protein, 17 aa, Artificial Sequence
  Synthetically generated peptide
  VARIANT (1)..(17): Xaa = Any Amino Acid
ACELCAXNPXAXCXTGC

SEQ ID NO: 6989 - protein, 17 aa, Artificial Sequence
  Synthetically generated peptide
  VARIANT (1)..(17): Xaa = Any Amino Acid
ACELCAXNPXAXCTXGC

SEQ ID NO: 6990 - protein, 17 aa, Artificial Sequence
  Synthetically generated peptide
  VARIANT (1)..(17): Xaa = Any Amino Acid
ACELCAXNPXAXCTGXC

SEQ ID NO: 6991 - protein, 16 aa, Artificial Sequence
  Synthetically generated peptide
  VARIANT (1)..(16): Xaa = Any Amino Acid
ACELCAXNPXACXTGC

SEQ ID NO: 6992 - protein, 17 aa, Artificial Sequence
  Synthetically generated peptide
  VARIANT (1)..(17): Xaa = Any Amino Acid
ACELCAXNPXACXXTGC

SEQ ID NO: 6993 - protein, 17 aa, Artificial Sequence
  Synthetically generated peptide
  VARIANT (1)..(17): Xaa = Any Amino Acid
ACELCAXNPXACXTXGC

SEQ ID NO: 6994 - protein, 17 aa, Artificial Sequence
  Synthetically generated peptide
  VARIANT (1)..(17): Xaa = Any Amino Acid
ACELCAXNPXACXTGXC

SEQ ID NO: 6995 - protein, 16 aa, Artificial Sequence
  Synthetically generated peptide
  VARIANT (1)..(16): Xaa = Any Amino Acid
ACELCAXNPXACTXGC

SEQ ID NO: 6996 - protein, 17 aa, Artificial Sequence
  Synthetically generated peptide
  VARIANT (1)..(17): Xaa = Any Amino Acid
ACELCAXNPXACTXXGC

SEQ ID NO: 6997 - protein, 17 aa, Artificial Sequence
  Synthetically generated peptide
  VARIANT (1)..(17): Xaa = Any Amino Acid
ACELCAXNPXACTXGXC

SEQ ID NO: 6998 - protein, 16 aa, Artificial Sequence
  Synthetically generated peptide
  VARIANT (1)..(16): Xaa = Any Amino Acid
ACELCAXNPXACTGXC

SEQ ID NO: 6999 - protein, 17 aa, Artificial Sequence
  Synthetically generated peptide
  VARIANT (1)..(17): Xaa = Any Amino Acid
ACELCAXNPXACTGXXC

SEQ ID NO: 7000 - protein, 15 aa, Artificial Sequence
  Synthetically generated peptide
  VARIANT (1)..(15): Xaa = Any Amino Acid
ACELCAXNPAXCTGC

SEQ ID NO: 7001 - protein, 16 aa, Artificial Sequence
  Synthetically generated peptide
  VARIANT (1)..(16): Xaa = Any Amino Acid
ACELCAXNPAXXCTGC

SEQ ID NO: 7002 - protein, 17 aa, Artificial Sequence
  Synthetically generated peptide
  VARIANT (1)..(17): Xaa = Any Amino Acid
ACELCAXNPAXXXCTGC

SEQ ID NO: 7003 - protein, 17 aa, Artificial Sequence
  Synthetically generated peptide
  VARIANT (1)..(17): Xaa = Any Amino Acid
ACELCAXNPAXXCXTGC

SEQ ID NO: 7004 - protein, 17 aa, Artificial Sequence
  Synthetically generated peptide
  VARIANT (1)..(17): Xaa = Any Amino Acid
ACELCAXNPAXXCTXGC

SEQ ID NO: 7005 - protein, 17 aa, Artificial Sequence
  Synthetically generated peptide
  VARIANT (1)..(17): Xaa = Any Amino Acid
ACELCAXNPAXXCTGXC

SEQ ID NO: 7006 - protein, 16 aa, Artificial Sequence
  Synthetically generated peptide
  VARIANT (1)..(16): Xaa = Any Amino Acid
ACELCAXNPAXCXTGC

SEQ ID NO: 7007 - protein, 17 aa, Artificial Sequence
  Synthetically generated peptide
  VARIANT (1)..(17): Xaa = Any Amino Acid
ACELCAXNPAXCXXTGC

SEQ ID NO: 7008 - protein, 17 aa, Artificial Sequence
  Synthetically generated peptide
  VARIANT (1)..(17): Xaa = Any Amino Acid
ACELCAXNPAXCXTXGC

SEQ ID NO: 7009 - protein, 17 aa, Artificial Sequence
  Synthetically generated peptide
  VARIANT (1)..(17): Xaa = Any Amino Acid
ACELCAXNPAXCXTGXC

SEQ ID NO: 7010 - protein, 16 aa, Artificial Sequence
  Synthetically generated peptide
  VARIANT (1)..(16): Xaa = Any Amino Acid
ACELCAXNPAXCTXGC

SEQ ID NO: 7011 - protein, 17 aa, Artificial Sequence
  Synthetically generated peptide
  VARIANT (1)..(17): Xaa = Any Amino Acid
ACELCAXNPAXCTXXGC

SEQ ID NO: 7012 - protein, 17 aa, Artificial Sequence
  Synthetically generated peptide
  VARIANT (1)..(17): Xaa = Any Amino Acid
ACELCAXNPAXCTXGXC

SEQ ID NO: 7013 - protein, 16 aa, Artificial Sequence
  Synthetically generated peptide
  VARIANT (1)..(16): Xaa = Any Amino Acid
ACELCAXNPAXCTGXC

SEQ ID NO: 7014 - protein, 17 aa, Artificial Sequence
  Synthetically generated peptide
  VARIANT (1)..(17): Xaa = Any Amino Acid
ACELCAXNPAXCTGXXC

SEQ ID NO: 7015 - protein, 15 aa, Artificial Sequence
  Synthetically generated peptide
  VARIANT (1)..(15): Xaa = Any Amino Acid
ACELCAXNPACXTGC

SEQ ID NO: 7016 - protein, 16 aa, Artificial Sequence
  Synthetically generated peptide
  VARIANT (1)..(16): Xaa = Any Amino Acid
ACELCAXNPACXXTGC

SEQ ID NO: 7017 - protein, 17 aa, Artificial Sequence
  Synthetically generated peptide
  VARIANT (1)..(17): Xaa = Any Amino Acid
ACELCAXNPACXXXTGC

SEQ ID NO: 7018 - protein, 17 aa, Artificial Sequence
  Synthetically generated peptide
  VARIANT (1)..(17): Xaa = Any Amino Acid
ACELCAXNPACXXTXGC

SEQ ID NO: 7019 - protein, 17 aa, Artificial Sequence
  Synthetically generated peptide
  VARIANT (1)..(17): Xaa = Any Amino Acid
ACELCAXNPACXXTGXC

SEQ ID NO: 7020 - protein, 16 aa, Artificial Sequence
  Synthetically generated peptide
  VARIANT (1)..(16): Xaa = Any Amino Acid
ACELCAXNPACXTXGC

SEQ ID NO: 7021 - protein, 17 aa, Artificial Sequence
  Synthetically generated peptide
  VARIANT (1)..(17): Xaa = Any Amino Acid
ACELCAXNPACXTXXGC

SEQ ID NO: 7022 - protein, 17 aa, Artificial Sequence
  Synthetically generated peptide
  VARIANT (1)..(17): Xaa = Any Amino Acid
ACELCAXNPACXTXGXC

SEQ ID NO: 7023 - protein, 16 aa, Artificial Sequence
  Synthetically generated peptide
  VARIANT (1)..(16): Xaa = Any Amino Acid
ACELCAXNPACXTGXC

SEQ ID NO: 7024 - protein, 17 aa, Artificial Sequence
  Synthetically generated peptide
  VARIANT (1)..(17): Xaa = Any Amino Acid
ACELCAXNPACXTGXXC

SEQ ID NO: 7025 - protein, 15 aa, Artificial Sequence
  Synthetically generated peptide
  VARIANT (1)..(15): Xaa = Any Amino Acid
ACELCAXNPACTXGC

SEQ ID NO: 7026 - protein, 16 aa, Artificial Sequence
  Synthetically generated peptide
  VARIANT (1)..(16): Xaa = Any Amino Acid
ACELCAXNPACTXXGC

SEQ ID NO: 7027 - protein, 17 aa, Artificial Sequence
  Synthetically generated peptide
  VARIANT (1)..(17): Xaa = Any Amino Acid
ACELCAXNPACTXXXGC

SEQ ID NO: 7028 - protein, 17 aa, Artificial Sequence
  Synthetically generated peptide
  VARIANT (1)..(17): Xaa = Any Amino Acid
ACELCAXNPACTXXGXC

SEQ ID NO: 7029 - protein, 16 aa, Artificial Sequence
  Synthetically generated peptide
  VARIANT (1)..(16): Xaa = Any Amino Acid
ACELCAXNPACTXGXC

SEQ ID NO: 7030 - protein, 17 aa, Artificial Sequence
  Synthetically generated peptide
  VARIANT (1)..(17): Xaa = Any Amino Acid
ACELCAXNPACTXGXXC

SEQ ID NO: 7031 - protein, 15 aa, Artificial Sequence
  Synthetically generated peptide
  VARIANT (1)..(15): Xaa = Any Amino Acid
ACELCAXNPACTGXC

SEQ ID NO: 7032 - protein, 16 aa, Artificial Sequence
  Synthetically generated peptide
  VARIANT (1)..(16): Xaa = Any Amino Acid
ACELCAXNPACTGXXC

SEQ ID NO: 7033 - protein, 17 aa, Artificial Sequence
  Synthetically generated peptide
  VARIANT (1)..(17): Xaa = Any Amino Acid
ACELCAXNPACTGXXXC

SEQ ID NO: 7034 - protein, 14 aa, Artificial Sequence
  Synthetically generated peptide
  VARIANT (1)..(14): Xaa = Any Amino Acid
ACELCANXPACTGC

SEQ ID NO: 7035 - protein, 15 aa, Artificial Sequence
  Synthetically generated peptide
  VARIANT (1)..(15): Xaa = Any Amino Acid
ACELCANXXPACTGC

SEQ ID NO: 7036 - protein, 16 aa, Artificial Sequence
  Synthetically generated peptide
  VARIANT (1)..(16): Xaa = Any Amino Acid
ACELCANXXXPACTGC

SEQ ID NO: 7037 - protein, 17 aa, Artificial Sequence
  Synthetically generated peptide
  VARIANT (1)..(17): Xaa = Any Amino Acid
ACELCANXXXXPACTGC

SEQ ID NO: 7038 - protein, 17 aa, Artificial Sequence
  Synthetically generated peptide
  VARIANT (1)..(17): Xaa = Any Amino Acid
ACELCANXXXPXACTGC

SEQ ID NO: 7039 - protein, 17 aa, Artificial Sequence
  Synthetically generated peptide
  VARIANT (1)..(17): Xaa = Any Amino Acid
ACELCANXXXPAXCTGC

SEQ ID NO: 7040 - protein, 17 aa, Artificial Sequence
  Synthetically generated peptide
  VARIANT (1)..(17): Xaa = Any Amino Acid
ACELCANXXXPACXTGC

SEQ ID NO: 7041 - protein, 17 aa, Artificial Sequence
  Synthetically generated peptide
  VARIANT (1)..(17): Xaa = Any Amino Acid
ACELCANXXXPACTXGC

SEQ ID NO: 7042 - protein, 17 aa, Artificial Sequence
  Synthetically generated peptide
  VARIANT (1)..(17): Xaa = Any Amino Acid
ACELCANXXXPACTGXC

SEQ ID NO: 7043 - protein, 16 aa, Artificial Sequence
  Synthetically generated peptide
  VARIANT (1)..(16): Xaa = Any Amino Acid
ACELCANXXPXACTGC

SEQ ID NO: 7044 - protein, 17 aa, Artificial Sequence
  Synthetically generated peptide
  VARIANT (1)..(17): Xaa = Any Amino Acid
ACELCANXXPXXACTGC

SEQ ID NO: 7045 - protein, 17 aa, Artificial Sequence
  Synthetically generated peptide
  VARIANT (1)..(17): Xaa = Any Amino Acid
ACELCANXXPXAXCTGC

SEQ ID NO: 7046 - protein, 17 aa, Artificial Sequence
  Synthetically generated peptide
  VARIANT (1)..(17): Xaa = Any Amino Acid
ACELCANXXPXACXTGC

SEQ ID NO: 7047 - protein, 17 aa, Artificial Sequence
  Synthetically generated peptide
  VARIANT (1)..(17): Xaa = Any Amino Acid
ACELCANXXPXACTXGC

SEQ ID NO: 7048 - protein, 17 aa, Artificial Sequence
  Synthetically generated peptide
  VARIANT (1)..(17): Xaa = Any Amino Acid
ACELCANXXPXACTGXC

SEQ ID NO: 7049 - protein, 16 aa, Artificial Sequence
  Synthetically generated peptide
  VARIANT (1)..(16): Xaa = Any Amino Acid
ACELCANXXPAXCTGC

SEQ ID NO: 7050 - protein, 17 aa, Artificial Sequence
  Synthetically generated peptide
  VARIANT (1)..(17): Xaa = Any Amino Acid
ACELCANXXPAXXCTGC

SEQ ID NO: 7051 - protein, 17 aa, Artificial Sequence
  Synthetically generated peptide
  VARIANT (1)..(17): Xaa = Any Amino Acid
ACELCANXXPAXCXTGC

SEQ ID NO: 7052 - protein, 17 aa, Artificial Sequence
  Synthetically generated peptide
  VARIANT (1)..(17): Xaa = Any Amino Acid
ACELCANXXPAXCTXGC

SEQ ID NO: 7053 - protein, 17 aa, Artificial Sequence
  Synthetically generated peptide
  VARIANT (1)..(17): Xaa = Any Amino Acid
ACELCANXXPAXCTGXC

SEQ ID NO: 7054 - protein, 16 aa, Artificial Sequence
  Synthetically generated peptide
  VARIANT (1)..(16): Xaa = Any Amino Acid
ACELCANXXPACXTGC

SEQ ID NO: 7055 - protein, 17 aa, Artificial Sequence
  Synthetically generated peptide
  VARIANT (1)..(17): Xaa = Any Amino Acid
ACELCANXXPACXXTGC

SEQ ID NO: 7056 - protein, 17 aa, Artificial Sequence
  Synthetically generated peptide
  VARIANT (1)..(17): Xaa = Any Amino Acid
ACELCANXXPACXTXGC

SEQ ID NO: 7057 - protein, 17 aa, Artificial Sequence
  Synthetically generated peptide
  VARIANT (1)..(17): Xaa = Any Amino Acid
ACELCANXXPACXTGXC

SEQ ID NO: 7058 - protein, 16 aa, Artificial Sequence
  Synthetically generated peptide
  VARIANT (1)..(16): Xaa = Any Amino Acid
ACELCANXXPACTXGC

SEQ ID NO: 7059 - protein, 17 aa, Artificial Sequence
  Synthetically generated peptide
  VARIANT (1)..(17): Xaa = Any Amino Acid
ACELCANXXPACTXXGC

SEQ ID NO: 7060 - protein, 17 aa, Artificial Sequence
  Synthetically generated peptide
  VARIANT (1)..(17): Xaa = Any Amino Acid
ACELCANXXPACTXGXC

SEQ ID NO: 7061 - protein, 16 aa, Artificial Sequence
  Synthetically generated peptide
  VARIANT (1)..(16): Xaa = Any Amino Acid
ACELCANXXPACTGXC

SEQ ID NO: 7062 - protein, 17 aa, Artificial Sequence
  Synthetically generated peptide
  VARIANT (1)..(17): Xaa = Any Amino Acid
ACELCANXXPACTGXXC

SEQ ID NO: 7063 - protein, 15 aa, Artificial Sequence
  Synthetically generated peptide
  VARIANT (1)..(15): Xaa = Any Amino Acid
ACELCANXPXACTGC

SEQ ID NO: 7064 - protein, 16 aa, Artificial Sequence
  Synthetically generated peptide
  VARIANT (1)..(16): Xaa = Any Amino Acid
ACELCANXPXXACTGC

SEQ ID NO: 7065 - protein, 17 aa, Artificial Sequence
  Synthetically generated peptide
  VARIANT (1)..(17): Xaa = Any Amino Acid
ACELCANXPXXXACTGC

SEQ ID NO: 7066 - protein, 17 aa, Artificial Sequence
  Synthetically generated peptide
  VARIANT (1)..(17): Xaa = Any Amino Acid
ACELCANXPXXAXCTGC

SEQ ID NO: 7067 - protein, 17 aa, Artificial Sequence
  Synthetically generated peptide
  VARIANT (1)..(17): Xaa = Any Amino Acid
ACELCANXPXXACXTGC

SEQ ID NO: 7068 - protein, 17 aa, Artificial Sequence
  Synthetically generated peptide
  VARIANT (1)..(17): Xaa = Any Amino Acid
ACELCANXPXXACTXGC

SEQ ID NO: 7069 - protein, 17 aa, Artificial Sequence
  Synthetically generated peptide
  VARIANT (1)..(17): Xaa = Any Amino Acid
ACELCANXPXXACTGXC

SEQ ID NO: 7070 - protein, 16 aa, Artificial Sequence
  Synthetically generated peptide
  VARIANT (1)..(16): Xaa = Any Amino Acid
ACELCANXPXAXCTGC

SEQ ID NO: 7071 - protein, 17 aa, Artificial Sequence
  Synthetically generated peptide
  VARIANT (1)..(17): Xaa = Any Amino Acid
ACELCANXPXAXXCTGC

SEQ ID NO: 7072 - protein, 17 aa, Artificial Sequence
  Synthetically generated peptide
  VARIANT (1)..(17): Xaa = Any Amino Acid
ACELCANXPXAXCXTGC

SEQ ID NO: 7073 - protein, 17 aa, Artificial Sequence
  Synthetically generated peptide
  VARIANT (1)..(17): Xaa = Any Amino Acid
ACELCANXPXAXCTXGC

SEQ ID NO: 7074 - protein, 17 aa, Artificial Sequence
  Synthetically generated peptide
  VARIANT (1)..(17): Xaa = Any Amino Acid
ACELCANXPXAXCTGXC

SEQ ID NO: 7075 - protein, 16 aa, Artificial Sequence
  Synthetically generated peptide
  VARIANT (1)..(16): Xaa = Any Amino Acid
ACELCANXPXACXTGC

SEQ ID NO: 7076 - protein, 17 aa, Artificial Sequence
  Synthetically generated peptide
  VARIANT (1)..(17): Xaa = Any Amino Acid
ACELCANXPXACXXTGC

SEQ ID NO: 7077 - protein, 17 aa, Artificial Sequence
  Synthetically generated peptide
  VARIANT (1)..(17): Xaa = Any Amino Acid
ACELCANXPXACXTXGC

SEQ ID NO: 7078 - protein, 17 aa, Artificial Sequence
  Synthetically generated peptide
  VARIANT (1)..(17): Xaa = Any Amino Acid
ACELCANXPXACXTGXC

SEQ ID NO: 7079 - protein, 16 aa, Artificial Sequence
  Synthetically generated peptide
  VARIANT (1)..(16): Xaa = Any Amino Acid
ACELCANXPXACTXGC

SEQ ID NO: 7080 - protein, 17 aa, Artificial Sequence
  Synthetically generated peptide
  VARIANT (1)..(17): Xaa = Any Amino Acid
ACELCANXPXACTXXGC

SEQ ID NO: 7081 - protein, 17 aa, Artificial Sequence
  Synthetically generated peptide
  VARIANT (1)..(17): Xaa = Any Amino Acid
ACELCANXPXACTXGXC

SEQ ID NO: 7082 - protein, 16 aa, Artificial Sequence
  Synthetically generated peptide
  VARIANT (1)..(16): Xaa = Any Amino Acid
ACELCANXPXACTGXC

SEQ ID NO: 7083 - protein, 17 aa, Artificial Sequence
  Synthetically generated peptide
  VARIANT (1)..(17): Xaa = Any Amino Acid
ACELCANXPXACTGXXC

SEQ ID NO: 7084 - protein, 15 aa, Artificial Sequence
  Synthetically generated peptide
  VARIANT (1)..(15): Xaa = Any Amino Acid
ACELCANXPAXCTGC

SEQ ID NO: 7085 - protein, 16 aa, Artificial Sequence
  Synthetically generated peptide
  VARIANT (1)..(16): Xaa = Any Amino Acid
ACELCANXPAXXCTGC

SEQ ID NO: 7086 - protein, 17 aa, Artificial Sequence
  Synthetically generated peptide
  VARIANT (1)..(17): Xaa = Any Amino Acid
ACELCANXPAXXXCTGC

SEQ ID NO: 7087 - protein, 17 aa, Artificial Sequence
  Synthetically generated peptide
  VARIANT (1)..(17): Xaa = Any Amino Acid
ACELCANXPAXXCXTGC

SEQ ID NO: 7088 - protein, 17 aa, Artificial Sequence
  Synthetically generated peptide
  VARIANT (1)..(17): Xaa = Any Amino Acid
ACELCANXPAXXCTXGC

SEQ ID NO: 7089 - protein, 17 aa, Artificial Sequence
  Synthetically generated peptide
  VARIANT (1)..(17): Xaa = Any Amino Acid
ACELCANXPAXXCTGXC

SEQ ID NO: 7090 - protein, 16 aa, Artificial Sequence
  Synthetically generated peptide
  VARIANT (1)..(16): Xaa = Any Amino Acid
ACELCANXPAXCXTGC

SEQ ID NO: 7091 - protein, 17 aa, Artificial Sequence
  Synthetically generated peptide
  VARIANT (1)..(17): Xaa = Any Amino Acid
ACELCANXPAXCXXTGC

SEQ ID NO: 7092 - protein, 17 aa, Artificial Sequence
  Synthetically generated peptide
  VARIANT (1)..(17): Xaa = Any Amino Acid
ACELCANXPAXCXTXGC

SEQ ID NO: 7093 - protein, 17 aa, Artificial Sequence
  Synthetically generated peptide
  VARIANT (1)..(17): Xaa = Any Amino Acid
ACELCANXPAXCXTGXC

SEQ ID NO: 7094 - protein, 16 aa, Artificial Sequence
  Synthetically generated peptide
  VARIANT (1)..(16): Xaa = Any Amino Acid
ACELCANXPAXCTXGC

SEQ ID NO: 7095 - protein, 17 aa, Artificial Sequence
  Synthetically generated peptide
  VARIANT (1)..(17): Xaa = Any Amino Acid
ACELCANXPAXCTXXGC

SEQ ID NO: 7096 - protein, 17 aa, Artificial Sequence
  Synthetically generated peptide
  VARIANT (1)..(17): Xaa = Any Amino Acid
ACELCANXPAXCTXGXC

SEQ ID NO: 7097 - protein, 16 aa, Artificial Sequence
  Synthetically generated peptide
  VARIANT (1)..(16): Xaa = Any Amino Acid
ACELCANXPAXCTGXC

SEQ ID NO: 7098 - protein, 17 aa, Artificial Sequence
  Synthetically generated peptide
  VARIANT (1)..(17): Xaa = Any Amino Acid
ACELCANXPAXCTGXXC

SEQ ID NO: 7099 - protein, 15 aa, Artificial Sequence
  Synthetically generated peptide
  VARIANT (1)..(15): Xaa = Any Amino Acid
ACELCANXPACXTGC

SEQ ID NO: 7100 - protein, 16 aa, Artificial Sequence
  Synthetically generated peptide
  VARIANT (1)..(16): Xaa = Any Amino Acid
ACELCANXPACXXTGC

SEQ ID NO: 7101 - protein, 17 aa, Artificial Sequence
  Synthetically generated peptide
  VARIANT (1)..(17): Xaa = Any Amino Acid
ACELCANXPACXXXTGC

SEQ ID NO: 7102 - protein, 17 aa, Artificial Sequence
  Synthetically generated peptide
  VARIANT (1)..(17): Xaa = Any Amino Acid
ACELCANXPACXXTXGC

SEQ ID NO: 7103 - protein, 17 aa, Artificial Sequence
  Synthetically generated peptide
  VARIANT (1)..(17): Xaa = Any Amino Acid
ACELCANXPACXXTGXC

SEQ ID NO: 7104 - protein, 16 aa, Artificial Sequence
  Synthetically generated peptide
  VARIANT (1)..(16): Xaa = Any Amino Acid
ACELCANXPACXTXGC

SEQ ID NO: 7105 - protein, 17 aa, Artificial Sequence
  Synthetically generated peptide
  VARIANT (1)..(17): Xaa = Any Amino Acid
ACELCANXPACXTXXGC

SEQ ID NO: 7106 - protein, 17 aa, Artificial Sequence
  Synthetically generated peptide
  VARIANT (1)..(17): Xaa = Any Amino Acid
ACELCANXPACXTXGXC

SEQ ID NO: 7107 - protein, 16 aa, Artificial Sequence
  Synthetically generated peptide
  VARIANT (1)..(16): Xaa = Any Amino Acid
ACELCANXPACXTGXC

SEQ ID NO: 7108 - protein, 17 aa, Artificial Sequence
  Synthetically generated peptide
  VARIANT (1)..(17): Xaa = Any Amino Acid
ACELCANXPACXTGXXC

SEQ ID NO: 7109 - protein, 15 aa, Artificial Sequence
  Synthetically generated peptide
  VARIANT (1)..(15): Xaa = Any Amino Acid
ACELCANXPACTXGC

SEQ ID NO: 7110 - protein, 16 aa, Artificial Sequence
  Synthetically generated peptide
  VARIANT (1)..(16): Xaa = Any Amino Acid
ACELCANXPACTXXGC

SEQ ID NO: 7111 - protein, 17 aa, Artificial Sequence
  Synthetically generated peptide
  VARIANT (1)..(17): Xaa = Any Amino Acid
ACELCANXPACTXXXGC

SEQ ID NO: 7112 - protein, 17 aa, Artificial Sequence
  Synthetically generated peptide
  VARIANT (1)..(17): Xaa = Any Amino Acid
ACELCANXPACTXXGXC

SEQ ID NO: 7113 - protein, 16 aa, Artificial Sequence
  Synthetically generated peptide
  VARIANT (1)..(16): Xaa = Any Amino Acid
ACELCANXPACTXGXC

SEQ ID NO: 7114 - protein, 17 aa, Artificial Sequence
  Synthetically generated peptide
  VARIANT (1)..(17): Xaa = Any Amino Acid
ACELCANXPACTXGXXC

SEQ ID NO: 7115 - protein, 15 aa, Artificial Sequence
  Synthetically generated peptide
  VARIANT (1)..(15): Xaa = Any Amino Acid
ACELCANXPACTGXC

SEQ ID NO: 7116 - protein, 16 aa, Artificial Sequence
  Synthetically generated peptide
  VARIANT (1)..(16): Xaa = Any Amino Acid
ACELCANXPACTGXXC

SEQ ID NO: 7117 - protein, 17 aa, Artificial Sequence
  Synthetically generated peptide
  VARIANT (1)..(17): Xaa = Any Amino Acid
ACELCANXPACTGXXXC

SEQ ID NO: 7118 - protein, 14 aa, Artificial Sequence
  Synthetically generated peptide
  VARIANT (1)..(14): Xaa = Any Amino Acid
ACELCANPXACTGC

SEQ ID NO: 7119 - protein, 15 aa, Artificial Sequence
  Synthetically generated peptide
  VARIANT (1)..(15): Xaa = Any Amino Acid
ACELCANPXXACTGC

SEQ ID NO: 7120 - protein, 16 aa, Artificial Sequence
  Synthetically generated peptide
  VARIANT (1)..(16): Xaa = Any Amino Acid
ACELCANPXXXACTGC

SEQ ID NO: 7121 - protein, 17 aa, Artificial Sequence
  Synthetically generated peptide
  VARIANT (1)..(17): Xaa = Any Amino Acid
ACELCANPXXXXACTGC

SEQ ID NO: 7122 - protein, 17 aa, Artificial Sequence
  Synthetically generated peptide
  VARIANT (1)..(17): Xaa = Any Amino Acid
ACELCANPXXXAXCTGC

SEQ ID NO: 7123 - protein, 17 aa, Artificial Sequence
  Synthetically generated peptide
  VARIANT (1)..(17): Xaa = Any Amino Acid
ACELCANPXXXACXTGC

SEQ ID NO: 7124 - protein, 17 aa, Artificial Sequence
  Synthetically generated peptide
  VARIANT (1)..(17): Xaa = Any Amino Acid
ACELCANPXXXACTXGC

SEQ ID NO: 7125 - protein, 17 aa, Artificial Sequence
  Synthetically generated peptide
  VARIANT (1)..(17): Xaa = Any Amino Acid
ACELCANPXXXACTGXC

SEQ ID NO: 7126 - protein, 16 aa, Artificial Sequence
  Synthetically generated peptide
  VARIANT (1)..(16): Xaa = Any Amino Acid
ACELCANPXXAXCTGC

SEQ ID NO: 7127 - protein, 17 aa, Artificial Sequence
  Synthetically generated peptide
  VARIANT (1)..(17): Xaa = Any Amino Acid
ACELCANPXXAXXCTGC

SEQ ID NO: 7128 - protein, 17 aa, Artificial Sequence
  Synthetically generated peptide
  VARIANT (1)..(17): Xaa = Any Amino Acid
ACELCANPXXAXCXTGC

SEQ ID NO: 7129 - protein, 17 aa, Artificial Sequence
  Synthetically generated peptide
  VARIANT (1)..(17): Xaa = Any Amino Acid
ACELCANPXXAXCTXGC

SEQ ID NO: 7130 - protein, 17 aa, Artificial Sequence
  Synthetically generated peptide
  VARIANT (1)..(17): Xaa = Any Amino Acid
ACELCANPXXAXCTGXC

SEQ ID NO: 7131 - protein, 16 aa, Artificial Sequence
  Synthetically generated peptide
  VARIANT (1)..(16): Xaa = Any Amino Acid
ACELCANPXXACXTGC

SEQ ID NO: 7132 - protein, 17 aa, Artificial Sequence
  Synthetically generated peptide
  VARIANT (1)..(17): Xaa = Any Amino Acid
ACELCANPXXACXXTGC

SEQ ID NO: 7133 - protein, 17 aa, Artificial Sequence
  Synthetically generated peptide
  VARIANT (1)..(17): Xaa = Any Amino Acid
ACELCANPXXACXTXGC

SEQ ID NO: 7134 - protein, 17 aa, Artificial Sequence
  Synthetically generated peptide
  VARIANT (1)..(17): Xaa = Any Amino Acid
ACELCANPXXACXTGXC

SEQ ID NO: 7135 - protein, 16 aa, Artificial Sequence
  Synthetically generated peptide
  VARIANT (1)..(16): Xaa = Any Amino Acid
ACELCANPXXACTXGC

SEQ ID NO: 7136 - protein, 17 aa, Artificial Sequence
  Synthetically generated peptide
  VARIANT (1)..(17): Xaa = Any Amino Acid
ACELCANPXXACTXXGC

SEQ ID NO: 7137 - protein, 17 aa, Artificial Sequence
  Synthetically generated peptide
  VARIANT (1)..(17): Xaa = Any Amino Acid
ACELCANPXXACTXGXC

SEQ ID NO: 7138 - protein, 16 aa, Artificial Sequence
  Synthetically generated peptide
  VARIANT (1)..(16): Xaa = Any Amino Acid
ACELCANPXXACTGXC

SEQ ID NO: 7139 - protein, 17 aa, Artificial Sequence
  Synthetically generated peptide
  VARIANT (1)..(17): Xaa = Any Amino Acid
ACELCANPXXACTGXXC

SEQ ID NO: 7140 - protein, 15 aa, Artificial Sequence
  Synthetically generated peptide
  VARIANT (1)..(15): Xaa = Any Amino Acid
ACELCANPXAXCTGC

SEQ ID NO: 7141 - protein, 16 aa, Artificial Sequence
  Synthetically generated peptide
  VARIANT (1)..(16): Xaa = Any Amino Acid
ACELCANPXAXXCTGC

SEQ ID NO: 7142 - protein, 17 aa, Artificial Sequence
  Synthetically generated peptide
  VARIANT (1)..(17): Xaa = Any Amino Acid
ACELCANPXAXXXCTGC

SEQ ID NO: 7143 - protein, 17 aa, Artificial Sequence
  Synthetically generated peptide
  VARIANT (1)..(17): Xaa = Any Amino Acid
ACELCANPXAXXCXTGC

SEQ ID NO: 7144 - protein, 17 aa, Artificial Sequence
  Synthetically generated peptide
  VARIANT (1)..(17): Xaa = Any Amino Acid
ACELCANPXAXXCTXGC

SEQ ID NO: 7145 - protein, 17 aa, Artificial Sequence
  Synthetically generated peptide
  VARIANT (1)..(17): Xaa = Any Amino Acid
ACELCANPXAXXCTGXC

SEQ ID NO: 7146 - protein, 16 aa, Artificial Sequence
  Synthetically generated peptide
  VARIANT (1)..(16): Xaa = Any Amino Acid
ACELCANPXAXCXTGC

SEQ ID NO: 7147 - protein, 17 aa, Artificial Sequence
  Synthetically generated peptide
  VARIANT (1)..(17): Xaa = Any Amino Acid
ACELCANPXAXCXXTGC

SEQ ID NO: 7148 - protein, 17 aa, Artificial Sequence
  Synthetically generated peptide
  VARIANT (1)..(17): Xaa = Any Amino Acid
ACELCANPXAXCXTXGC

SEQ ID NO: 7149 - protein, 17 aa, Artificial Sequence
  Synthetically generated peptide
  VARIANT (1)..(17): Xaa = Any Amino Acid
ACELCANPXAXCXTGXC

SEQ ID NO: 7150 - protein, 16 aa, Artificial Sequence
  Synthetically generated peptide
  VARIANT (1)..(16): Xaa = Any Amino Acid
ACELCANPXAXCTXGC

SEQ ID NO: 7151 - protein, 17 aa, Artificial Sequence
  Synthetically generated peptide
  VARIANT (1)..(17): Xaa = Any Amino Acid
ACELCANPXAXCTXXGC

SEQ ID NO: 7152 - protein, 17 aa, Artificial Sequence
  Synthetically generated peptide
  VARIANT (1)..(17): Xaa = Any Amino Acid
ACELCANPXAXCTXGXC

SEQ ID NO: 7153 - protein, 16 aa, Artificial Sequence
  Synthetically generated peptide
  VARIANT (1)..(16): Xaa = Any Amino Acid
ACELCANPXAXCTGXC

SEQ ID NO: 7154 - protein, 17 aa, Artificial Sequence
  Synthetically generated peptide
  VARIANT (1)..(17): Xaa = Any Amino Acid
ACELCANPXAXCTGXXC

SEQ ID NO: 7155 - protein, 15 aa, Artificial Sequence
  Synthetically generated peptide
  VARIANT (1)..(15): Xaa = Any Amino Acid
ACELCANPXACXTGC

SEQ ID NO: 7156 - protein, 16 aa, Artificial Sequence
  Synthetically generated peptide
  VARIANT (1)..(16): Xaa = Any Amino Acid
ACELCANPXACXXTGC

SEQ ID NO: 7157 - protein, 17 aa, Artificial Sequence
  Synthetically generated peptide
  VARIANT (1)..(17): Xaa = Any Amino Acid
ACELCANPXACXXXTGC

SEQ ID NO: 7158 - protein, 17 aa, Artificial Sequence
  Synthetically generated peptide
  VARIANT (1)..(17): Xaa = Any Amino Acid
ACELCANPXACXXTXGC

SEQ ID NO: 7159 - protein, 17 aa, Artificial Sequence
  Synthetically generated peptide
  VARIANT (1)..(17): Xaa = Any Amino Acid
ACELCANPXACXXTGXC

SEQ ID NO: 7160 - protein, 16 aa, Artificial Sequence
  Synthetically generated peptide
  VARIANT (1)..(16): Xaa = Any Amino Acid
ACELCANPXACXTXGC

SEQ ID NO: 7161 - protein, 17 aa, Artificial Sequence
  Synthetically generated peptide
  VARIANT (1)..(17): Xaa = Any Amino Acid
ACELCANPXACXTXXGC

SEQ ID NO: 7162 - protein, 17 aa, Artificial Sequence
  Synthetically generated peptide
  VARIANT (1)..(17): Xaa = Any Amino Acid
ACELCANPXACXTXGXC

SEQ ID NO: 7163 - protein, 16 aa, Artificial Sequence
  Synthetically generated peptide
  VARIANT (1)..(16): Xaa = Any Amino Acid
ACELCANPXACXTGXC

SEQ ID NO: 7164 - protein, 17 aa, Artificial Sequence
  Synthetically generated peptide
  VARIANT (1)..(17): Xaa = Any Amino Acid
ACELCANPXACXTGXXC

SEQ ID NO: 7165 - protein, 15 aa, Artificial Sequence
  Synthetically generated peptide
  VARIANT (1)..(15): Xaa = Any Amino Acid
ACELCANPXACTXGC

SEQ ID NO: 7166 - protein, 16 aa, Artificial Sequence
  Synthetically generated peptide
  VARIANT (1)..(16): Xaa = Any Amino Acid
ACELCANPXACTXXGC

SEQ ID NO: 7167 - protein, 17 aa, Artificial Sequence
  Synthetically generated peptide
  VARIANT (1)..(17): Xaa = Any Amino Acid
ACELCANPXACTXXXGC

SEQ ID NO: 7168 - protein, 17 aa, Artificial Sequence
  Synthetically generated peptide
  VARIANT (1)..(17): Xaa = Any Amino Acid
ACELCANPXACTXXGXC

SEQ ID NO: 7169 - protein, 16 aa, Artificial Sequence
  Synthetically generated peptide
  VARIANT (1)..(16): Xaa = Any Amino Acid
ACELCANPXACTXGXC

SEQ ID NO: 7170 - protein, 17 aa, Artificial Sequence
  Synthetically generated peptide
  VARIANT (1)..(17): Xaa = Any Amino Acid
ACELCANPXACTXGXXC

SEQ ID NO: 7171 - protein, 15 aa, Artificial Sequence
  Synthetically generated peptide
  VARIANT (1)..(15): Xaa = Any Amino Acid
ACELCANPXACTGXC

SEQ ID NO: 7172 - protein, 16 aa, Artificial Sequence
  Synthetically generated peptide
  VARIANT (1)..(16): Xaa = Any Amino Acid
ACELCANPXACTGXXC

SEQ ID NO: 7173 - protein, 17 aa, Artificial Sequence
  Synthetically generated peptide
  VARIANT (1)..(17): Xaa = Any Amino Acid
ACELCANPXACTGXXXC

SEQ ID NO: 7174 - protein, 14 aa, Artificial Sequence
  Synthetically generated peptide
  VARIANT (1)..(14): Xaa = Any Amino Acid
ACELCANPAXCTGC

SEQ ID NO: 7175 - protein, 15 aa, Artificial Sequence
  Synthetically generated peptide
  VARIANT (1)..(15): Xaa = Any Amino Acid
ACELCANPAXXCTGC

SEQ ID NO: 7176 - protein, 16 aa, Artificial Sequence
  Synthetically generated peptide
  VARIANT (1)..(16): Xaa = Any Amino Acid
ACELCANPAXXXCTGC

SEQ ID NO: 7177 - protein, 17 aa, Artificial Sequence
  Synthetically generated peptide
  VARIANT (1)..(17): Xaa = Any Amino Acid
ACELCANPAXXXXCTGC

SEQ ID NO: 7178 - protein, 17 aa, Artificial Sequence
  Synthetically generated peptide
  VARIANT (1)..(17): Xaa = Any Amino Acid
ACELCANPAXXXCXTGC

SEQ ID NO: 7179 - protein, 17 aa, Artificial Sequence
  Synthetically generated peptide
  VARIANT (1)..(17): Xaa = Any Amino Acid
ACELCANPAXXXCTXGC

SEQ ID NO: 7180 - protein, 17 aa, Artificial Sequence
  Synthetically generated peptide
  VARIANT (1)..(17): Xaa = Any Amino Acid
ACELCANPAXXXCTGXC

SEQ ID NO: 7181 - protein, 16 aa, Artificial Sequence
  Synthetically generated peptide
  VARIANT (1)..(16): Xaa = Any Amino Acid
ACELCANPAXXCXTGC

SEQ ID NO: 7182 - protein, 17 aa, Artificial Sequence
  Synthetically generated peptide
  VARIANT (1)..(17): Xaa = Any Amino Acid
ACELCANPAXXCXXTGC

SEQ ID NO: 7183 - protein, 17 aa, Artificial Sequence
  Synthetically generated peptide
  VARIANT (1)..(17): Xaa = Any Amino Acid
ACELCANPAXXCXTXGC

SEQ ID NO: 7184 - protein, 17 aa, Artificial Sequence
  Synthetically generated peptide
  VARIANT (1)..(17): Xaa = Any Amino Acid
ACELCANPAXXCXTGXC

SEQ ID NO: 7185 - protein, 16 aa, Artificial Sequence
  Synthetically generated peptide
  VARIANT (1)..(16): Xaa = Any Amino Acid
ACELCANPAXXCTXGC

SEQ ID NO: 7186 - protein, 17 aa, Artificial Sequence
  Synthetically generated peptide
  VARIANT (1)..(17): Xaa = Any Amino Acid
ACELCANPAXXCTXXGC

SEQ ID NO: 7187 - protein, 17 aa, Artificial Sequence
  Synthetically generated peptide
  VARIANT (1)..(17): Xaa = Any Amino Acid
ACELCANPAXXCTXGXC

SEQ ID NO: 7188 - protein, 16 aa, Artificial Sequence
  Synthetically generated peptide
  VARIANT (1)..(16): Xaa = Any Amino Acid
ACELCANPAXXCTGXC

SEQ ID NO: 7189 - protein, 17 aa, Artificial Sequence
  Synthetically generated peptide
  VARIANT (1)..(17): Xaa = Any Amino Acid
ACELCANPAXXCTGXXC

SEQ ID NO: 7190 - protein, 15 aa, Artificial Sequence
  Synthetically generated peptide
  VARIANT (1)..(15): Xaa = Any Amino Acid
ACELCANPAXCXTGC

SEQ ID NO: 7191 - protein, 16 aa, Artificial Sequence
  Synthetically generated peptide
  VARIANT (1)..(16): Xaa = Any Amino Acid
ACELCANPAXCXXTGC

SEQ ID NO: 7192 - protein, 17 aa, Artificial Sequence
  Synthetically generated peptide
  VARIANT (1)..(17): Xaa = Any Amino Acid
ACELCANPAXCXXXTGC

SEQ ID NO: 7193 - protein, 17 aa, Artificial Sequence
  Synthetically generated peptide
  VARIANT (1)..(17): Xaa = Any Amino Acid
ACELCANPAXCXXTXGC

SEQ ID NO: 7194 - protein, 17 aa, Artificial Sequence
  Synthetically generated peptide
  VARIANT (1)..(17): Xaa = Any Amino Acid
ACELCANPAXCXXTGXC

SEQ ID NO: 7195 - protein, 16 aa, Artificial Sequence
  Synthetically generated peptide
  VARIANT (1)..(16): Xaa = Any Amino Acid
ACELCANPAXCXTXGC

SEQ ID NO: 7196 - protein, 17 aa, Artificial Sequence
  Synthetically generated peptide
  VARIANT (1)..(17): Xaa = Any Amino Acid
ACELCANPAXCXTXXGC

SEQ ID NO: 7197 - protein, 17 aa, Artificial Sequence
  Synthetically generated peptide
  VARIANT (1)..(17): Xaa = Any Amino Acid
ACELCANPAXCXTXGXC

SEQ ID NO: 7198 - protein, 16 aa, Artificial Sequence
  Synthetically generated peptide
  VARIANT (1)..(16): Xaa = Any Amino Acid
ACELCANPAXCXTGXC

SEQ ID NO: 7199 - protein, 17 aa, Artificial Sequence
  Synthetically generated peptide
  VARIANT (1)..(17): Xaa = Any Amino Acid
ACELCANPAXCXTGXXC

SEQ ID NO: 7200 - protein, 15 aa, Artificial Sequence
  Synthetically generated peptide
  VARIANT (1)..(15): Xaa = Any Amino Acid
ACELCANPAXCTXGC

SEQ ID NO: 7201 - protein, 16 aa, Artificial Sequence
  Synthetically generated peptide
  VARIANT (1)..(16): Xaa = Any Amino Acid
ACELCANPAXCTXXGC

SEQ ID NO: 7202 - protein, 17 aa, Artificial Sequence
  Synthetically generated peptide
  VARIANT (1)..(17): Xaa = Any Amino Acid
ACELCANPAXCTXXXGC

SEQ ID NO: 7203 - protein, 17 aa, Artificial Sequence
  Synthetically generated peptide
  VARIANT (1)..(17): Xaa = Any Amino Acid
ACELCANPAXCTXXGXC

SEQ ID NO: 7204 - protein, 16 aa, Artificial Sequence
  Synthetically generated peptide
  VARIANT (1)..(16): Xaa = Any Amino Acid
ACELCANPAXCTXGXC

SEQ ID NO: 7205 - protein, 17 aa, Artificial Sequence
  Synthetically generated peptide
  VARIANT (1)..(17): Xaa = Any Amino Acid
ACELCANPAXCTXGXXC

SEQ ID NO: 7206 - protein, 15 aa, Artificial Sequence
  Synthetically generated peptide
  VARIANT (1)..(15): Xaa = Any Amino Acid
ACELCANPAXCTGXC

SEQ ID NO: 7207 - protein, 16 aa, Artificial Sequence
  Synthetically generated peptide
  VARIANT (1)..(16): Xaa = Any Amino Acid
ACELCANPAXCTGXXC

SEQ ID NO: 7208 - protein, 17 aa, Artificial Sequence
  Synthetically generated peptide
  VARIANT (1)..(17): Xaa = Any Amino Acid
ACELCANPAXCTGXXXC

SEQ ID NO: 7209 - protein, 14 aa, Artificial Sequence
  Synthetically generated peptide
  VARIANT (1)..(14): Xaa = Any Amino Acid
ACELCANPACXTGC

SEQ ID NO: 7210 - protein, 15 aa, Artificial Sequence
  Synthetically generated peptide
  VARIANT (1)..(15): Xaa = Any Amino Acid
ACELCANPACXXTGC

SEQ ID NO: 7211 - protein, 16 aa, Artificial Sequence
  Synthetically generated peptide
  VARIANT (1)..(16): Xaa = Any Amino Acid
ACELCANPACXXXTGC

SEQ ID NO: 7212 - protein, 17 aa, Artificial Sequence
  Synthetically generated peptide
  VARIANT (1)..(17): Xaa = Any Amino Acid
ACELCANPACXXXXTGC

SEQ ID NO: 7213 - protein, 17 aa, Artificial Sequence
  Synthetically generated peptide
  VARIANT (1)..(17): Xaa = Any Amino Acid
ACELCANPACXXXTXGC

SEQ ID NO: 7214 - protein, 17 aa, Artificial Sequence
  Synthetically generated peptide
  VARIANT (1)..(17): Xaa = Any Amino Acid
ACELCANPACXXXTGXC

SEQ ID NO: 7215 - protein, 16 aa, Artificial Sequence
  Synthetically generated peptide
  VARIANT (1)..(16): Xaa = Any Amino Acid
ACELCANPACXXTXGC

SEQ ID NO: 7216 - protein, 17 aa, Artificial Sequence
  Synthetically generated peptide
  VARIANT (1)..(17): Xaa = Any Amino Acid
ACELCANPACXXTXXGC

SEQ ID NO: 7217 - protein, 17 aa, Artificial Sequence
  Synthetically generated peptide
  VARIANT (1)..(17): Xaa = Any Amino Acid
ACELCANPACXXTXGXC

SEQ ID NO: 7218 - protein, 16 aa, Artificial Sequence
  Synthetically generated peptide
  VARIANT (1)..(16): Xaa = Any Amino Acid
ACELCANPACXXTGXC

SEQ ID NO: 7219 - protein, 17 aa, Artificial Sequence
  Synthetically generated peptide
  VARIANT (1)..(17): Xaa = Any Amino Acid
ACELCANPACXXTGXXC

SEQ ID NO: 7220 - protein, 15 aa, Artificial Sequence
  Synthetically generated peptide
  VARIANT (1)..(15): Xaa = Any Amino Acid
ACELCANPACXTXGC

SEQ ID NO: 7221 - protein, 16 aa, Artificial Sequence
  Synthetically generated peptide
  VARIANT (1)..(16): Xaa = Any Amino Acid
ACELCANPACXTXXGC

SEQ ID NO: 7222 - protein, 17 aa, Artificial Sequence
  Synthetically generated peptide
  VARIANT (1)..(17): Xaa = Any Amino Acid
ACELCANPACXTXXXGC

SEQ ID NO: 7223 - protein, 17 aa, Artificial Sequence
  Synthetically generated peptide
  VARIANT (1)..(17): Xaa = Any Amino Acid
ACELCANPACXTXXGXC

SEQ ID NO: 7224 - protein, 16 aa, Artificial Sequence
  Synthetically generated peptide
  VARIANT (1)..(16): Xaa = Any Amino Acid
ACELCANPACXTXGXC

SEQ ID NO: 7225 - protein, 17 aa, Artificial Sequence
  Synthetically generated peptide
  VARIANT (1)..(17): Xaa = Any Amino Acid
ACELCANPACXTXGXXC

SEQ ID NO: 7226 - protein, 15 aa, Artificial Sequence
  Synthetically generated peptide
  VARIANT (1)..(15): Xaa = Any Amino Acid
ACELCANPACXTGXC

SEQ ID NO: 7227 - protein, 16 aa, Artificial Sequence
  Synthetically generated peptide
  VARIANT (1)..(16): Xaa = Any Amino Acid
ACELCANPACXTGXXC

SEQ ID NO: 7228 - protein, 17 aa, Artificial Sequence
  Synthetically generated peptide
  VARIANT (1)..(17): Xaa = Any Amino Acid
ACELCANPACXTGXXXC

SEQ ID NO: 7229 - protein, 14 aa, Artificial Sequence
  Synthetically generated peptide
  VARIANT (1)..(14): Xaa = Any Amino Acid
ACELCANPACTXGC

SEQ ID NO: 7230 - protein, 15 aa, Artificial Sequence
  Synthetically generated peptide
  VARIANT (1)..(15): Xaa = Any Amino Acid
ACELCANPACTXXGC

SEQ ID NO: 7231 - protein, 16 aa, Artificial Sequence
  Synthetically generated peptide
  VARIANT (1)..(16): Xaa = Any Amino Acid
ACELCANPACTXXXGC

SEQ ID NO: 7232 - protein, 17 aa, Artificial Sequence
  Synthetically generated peptide
  VARIANT (1)..(17): Xaa = Any Amino Acid
ACELCANPACTXXXXGC

SEQ ID NO: 7233 - protein, 17 aa, Artificial Sequence
  Synthetically generated peptide
  VARIANT (1)..(17): Xaa = Any Amino Acid
ACELCANPACTXXXGXC

SEQ ID NO: 7234 - protein, 16 aa, Artificial Sequence
  Synthetically generated peptide
  VARIANT (1)..(16): Xaa = Any Amino Acid
ACELCANPACTXXGXC

SEQ ID NO: 7235 - protein, 17 aa, Artificial Sequence
  Synthetically generated peptide
  VARIANT (1)..(17): Xaa = Any Amino Acid
ACELCANPACTXXGXXC

SEQ ID NO: 7236 - protein, 15 aa, Artificial Sequence
  Synthetically generated peptide
  VARIANT (1)..(15): Xaa = Any Amino Acid
ACELCANPACTXGXC

SEQ ID NO: 7237 - protein, 16 aa, Artificial Sequence
  Synthetically generated peptide
  VARIANT (1)..(16): Xaa = Any Amino Acid
ACELCANPACTXGXXC

SEQ ID NO: 7238 - protein, 17 aa, Artificial Sequence
  Synthetically generated peptide
  VARIANT (1)..(17): Xaa = Any Amino Acid
ACELCANPACTXGXXXC

SEQ ID NO: 7239 - protein, 14 aa, Artificial Sequence
  Synthetically generated peptide
  VARIANT (1)..(14): Xaa = Any Amino Acid
ACELCANPACTGXC

SEQ ID NO: 7240 - protein, 15 aa, Artificial Sequence
  Synthetically generated peptide
  VARIANT (1)..(15): Xaa = Any Amino Acid
ACELCANPACTGXXC

SEQ ID NO: 7241 - protein, 16 aa, Artificial Sequence
  Synthetically generated peptide
  VARIANT (1)..(16): Xaa = Any Amino Acid
ACELCANPACTGXXXC

SEQ ID NO: 7242 - protein, 17 aa, Artificial Sequence
  Synthetically generated peptide
  VARIANT (1)..(17): Xaa = Any Amino Acid
ACELCANPACTGXXXXC

SEQ ID NO: 7243 - protein, 14 aa, Artificial Sequence
  Synthetically generated peptide
  VARIANT (1)..(14): Xaa = Any Amino Acid
CCXELACNPACTGA

SEQ ID NO: 7244 - protein, 15 aa, Artificial Sequence
  Synthetically generated peptide
  VARIANT (1)..(15): Xaa = Any Amino Acid
CCXXELACNPACTGA

SEQ ID NO: 7245 - protein, 16 aa, Artificial Sequence
  Synthetically generated peptide
  VARIANT (1)..(16): Xaa = Any Amino Acid
CCXXXELACNPACTGA

SEQ ID NO: 7246 - protein, 17 aa, Artificial Sequence
  Synthetically generated peptide
  VARIANT (1)..(17): Xaa = Any Amino Acid
CCXXXXELACNPACTGA

SEQ ID NO: 7247 - protein, 17 aa, Artificial Sequence
  Synthetically generated peptide
  VARIANT (1)..(17): Xaa = Any Amino Acid
CCXXXEXLACNPACTGA

SEQ ID NO: 7248 - protein, 17 aa, Artificial Sequence
  Synthetically generated peptide
  VARIANT (1)..(17): Xaa = Any Amino Acid
CCXXXELXACNPACTGA

SEQ ID NO: 7249 - protein, 17 aa, Artificial Sequence
  Synthetically generated peptide
  VARIANT (1)..(17): Xaa = Any Amino Acid
CCXXXELACXNPACTGA

SEQ ID NO: 7250 - protein, 17 aa, Artificial Sequence
  Synthetically generated peptide
  VARIANT (1)..(17): Xaa = Any Amino Acid
CCXXXELACNXPACTGA

SEQ ID NO: 7251 - protein, 17 aa, Artificial Sequence
  Synthetically generated peptide
  VARIANT (1)..(17): Xaa = Any Amino Acid
CCXXXELACNPXACTGA

SEQ ID NO: 7252 - protein, 17 aa, Artificial Sequence
  Synthetically generated peptide
  VARIANT (1)..(17): Xaa = Any Amino Acid
CCXXXELACNPAXCTGA

SEQ ID NO: 7253 - protein, 17 aa, Artificial Sequence
  Synthetically generated peptide
  VARIANT (1)..(17): Xaa = Any Amino Acid
CCXXXELACNPACXTGA

SEQ ID NO: 7254 - protein, 17 aa, Artificial Sequence
  Synthetically generated peptide
  VARIANT (1)..(17): Xaa = Any Amino Acid
CCXXXELACNPACTXGA

SEQ ID NO: 7255 - protein, 17 aa, Artificial Sequence
  Synthetically generated peptide
  VARIANT (1)..(17): Xaa = Any Amino Acid
CCXXXELACNPACTGXA

SEQ ID NO: 7256 - protein, 16 aa, Artificial Sequence
  Synthetically generated peptide
  VARIANT (1)..(16): Xaa = Any Amino Acid
CCXXEXLACNPACTGA

SEQ ID NO: 7257 - protein, 17 aa, Artificial Sequence
  Synthetically generated peptide
  VARIANT (1)..(17): Xaa = Any Amino Acid
CCXXEXXLACNPACTGA

SEQ ID NO: 7258 - protein, 17 aa, Artificial Sequence
  Synthetically generated peptide
  VARIANT (1)..(17): Xaa = Any Amino Acid
CCXXEXLXACNPACTGA

SEQ ID NO: 7259 - protein, 17 aa, Artificial Sequence
  Synthetically generated peptide
  VARIANT (1)..(17): Xaa = Any Amino Acid
CCXXEXLACXNPACTGA

SEQ ID NO: 7260 - protein, 17 aa, Artificial Sequence
  Synthetically generated peptide
  VARIANT (1)..(17): Xaa = Any Amino Acid
CCXXEXLACNXPACTGA

SEQ ID NO: 7261 - protein, 17 aa, Artificial Sequence
  Synthetically generated peptide
  VARIANT (1)..(17): Xaa = Any Amino Acid
CCXXEXLACNPXACTGA

SEQ ID NO: 7262 - protein, 17 aa, Artificial Sequence
  Synthetically generated peptide
  VARIANT (1)..(17): Xaa = Any Amino Acid
CCXXEXLACNPAXCTGA

SEQ ID NO: 7263 - protein, 17 aa, Artificial Sequence
  Synthetically generated peptide
  VARIANT (1)..(17): Xaa = Any Amino Acid
CCXXEXLACNPACXTGA

SEQ ID NO: 7264 - protein, 17 aa, Artificial Sequence
  Synthetically generated peptide
  VARIANT (1)..(17): Xaa = Any Amino Acid
CCXXEXLACNPACTXGA

SEQ ID NO: 7265 - protein, 17 aa, Artificial Sequence
  Synthetically generated peptide
  VARIANT (1)..(17): Xaa = Any Amino Acid
CCXXEXLACNPACTGXA

SEQ ID NO: 7266 - protein, 16 aa, Artificial Sequence
  Synthetically generated peptide
  VARIANT (1)..(16): Xaa = Any Amino Acid
CCXXELXACNPACTGA

SEQ ID NO: 7267 - protein, 17 aa, Artificial Sequence
  Synthetically generated peptide
  VARIANT (1)..(17): Xaa = Any Amino Acid
CCXXELXXACNPACTGA

SEQ ID NO: 7268 - protein, 17 aa, Artificial Sequence
  Synthetically generated peptide
  VARIANT (1)..(17): Xaa = Any Amino Acid
CCXXELXACXNPACTGA

SEQ ID NO: 7269 - protein, 17 aa, Artificial Sequence
  Synthetically generated peptide
  VARIANT (1)..(17): Xaa = Any Amino Acid
CCXXELXACNXPACTGA

SEQ ID NO: 7270 - protein, 17 aa, Artificial Sequence
  Synthetically generated peptide
  VARIANT (1)..(17): Xaa = Any Amino Acid
CCXXELXACNPXACTGA

SEQ ID NO: 7271 - protein, 17 aa, Artificial Sequence
  Synthetically generated peptide
  VARIANT (1)..(17): Xaa = Any Amino Acid
CCXXELXACNPAXCTGA

SEQ ID NO: 7272 - protein, 17 aa, Artificial Sequence
  Synthetically generated peptide
  VARIANT (1)..(17): Xaa = Any Amino Acid
CCXXELXACNPACXTGA

SEQ ID NO: 7273 - protein, 17 aa, Artificial Sequence
  Synthetically generated peptide
  VARIANT (1)..(17): Xaa = Any Amino Acid
CCXXELXACNPACTXGA

SEQ ID NO: 7274 - protein, 17 aa, Artificial Sequence
  Synthetically generated peptide
  VARIANT (1)..(17): Xaa = Any Amino Acid
CCXXELXACNPACTGXA

SEQ ID NO: 7275 - protein, 16 aa, Artificial Sequence
  Synthetically generated peptide
  VARIANT (1)..(16): Xaa = Any Amino Acid
CCXXELACXNPACTGA

SEQ ID NO: 7276 - protein, 17 aa, Artificial Sequence
  Synthetically generated peptide
  VARIANT (1)..(17): Xaa = Any Amino Acid
CCXXELACXXNPACTGA

SEQ ID NO: 7277 - protein, 17 aa, Artificial Sequence
  Synthetically generated peptide
  VARIANT (1)..(17): Xaa = Any Amino Acid
CCXXELACXNXPACTGA

SEQ ID NO: 7278 - protein, 17 aa, Artificial Sequence
  Synthetically generated peptide
  VARIANT (1)..(17): Xaa = Any Amino Acid
CCXXELACXNPXACTGA

SEQ ID NO: 7279 - protein, 17 aa, Artificial Sequence
  Synthetically generated peptide
  VARIANT (1)..(17): Xaa = Any Amino Acid
CCXXELACXNPAXCTGA

SEQ ID NO: 7280 - protein, 17 aa, Artificial Sequence
  Synthetically generated peptide
  VARIANT (1)..(17): Xaa = Any Amino Acid
CCXXELACXNPACXTGA

SEQ ID NO: 7281 - protein, 17 aa, Artificial Sequence
  Synthetically generated peptide
  VARIANT (1)..(17): Xaa = Any Amino Acid
CCXXELACXNPACTXGA

SEQ ID NO: 7282 - protein, 17 aa, Artificial Sequence
  Synthetically generated peptide
  VARIANT (1)..(17): Xaa = Any Amino Acid
CCXXELACXNPACTGXA

SEQ ID NO: 7283 - protein, 16 aa, Artificial Sequence
  Synthetically generated peptide
  VARIANT (1)..(16): Xaa = Any Amino Acid
CCXXELACNXPACTGA

SEQ ID NO: 7284 - protein, 17 aa, Artificial Sequence
  Synthetically generated peptide
  VARIANT (1)..(17): Xaa = Any Amino Acid
CCXXELACNXXPACTGA

SEQ ID NO: 7285 - protein, 17 aa, Artificial Sequence
  Synthetically generated peptide
  VARIANT (1)..(17): Xaa = Any Amino Acid
CCXXELACNXPXACTGA

SEQ ID NO: 7286 - protein, 17 aa, Artificial Sequence
  Synthetically generated peptide
  VARIANT (1)..(17): Xaa = Any Amino Acid
CCXXELACNXPAXCTGA

SEQ ID NO: 7287 - protein, 17 aa, Artificial Sequence
  Synthetically generated peptide
  VARIANT (1)..(17): Xaa = Any Amino Acid
CCXXELACNXPACXTGA

SEQ ID NO: 7288 - protein, 17 aa, Artificial Sequence
  Synthetically generated peptide
  VARIANT (1)..(17): Xaa = Any Amino Acid
CCXXELACNXPACTXGA

SEQ ID NO: 7289 - protein, 17 aa, Artificial Sequence
  Synthetically generated peptide
  VARIANT (1)..(17): Xaa = Any Amino Acid
CCXXELACNXPACTGXA

SEQ ID NO: 7290 - protein, 16 aa, Artificial Sequence
  Synthetically generated peptide
  VARIANT (1)..(16): Xaa = Any Amino Acid
CCXXELACNPXACTGA

SEQ ID NO: 7291 - protein, 17 aa, Artificial Sequence
  Synthetically generated peptide
  VARIANT (1)..(17): Xaa = Any Amino Acid
CCXXELACNPXXACTGA

SEQ ID NO: 7292 - protein, 17 aa, Artificial Sequence
  Synthetically generated peptide
  VARIANT (1)..(17): Xaa = Any Amino Acid
CCXXELACNPXAXCTGA

SEQ ID NO: 7293 - protein, 17 aa, Artificial Sequence
  Synthetically generated peptide
  VARIANT (1)..(17): Xaa = Any Amino Acid
CCXXELACNPXACXTGA

SEQ ID NO: 7294 - protein, 17 aa, Artificial Sequence
  Synthetically generated peptide
  VARIANT (1)..(17): Xaa = Any Amino Acid
CCXXELACNPXACTXGA

SEQ ID NO: 7295 - protein, 17 aa, Artificial Sequence
  Synthetically generated peptide
  VARIANT (1)..(17): Xaa = Any Amino Acid
CCXXELACNPXACTGXA

SEQ ID NO: 7296 - protein, 16 aa, Artificial Sequence
  Synthetically generated peptide
  VARIANT (1)..(16): Xaa = Any Amino Acid
CCXXELACNPAXCTGA

SEQ ID NO: 7297 - protein, 17 aa, Artificial Sequence
  Synthetically generated peptide
  VARIANT (1)..(17): Xaa = Any Amino Acid
CCXXELACNPAXXCTGA

SEQ ID NO: 7298 - protein, 17 aa, Artificial Sequence
  Synthetically generated peptide
  VARIANT (1)..(17): Xaa = Any Amino Acid
CCXXELACNPAXCXTGA

SEQ ID NO: 7299 - protein, 17 aa, Artificial Sequence
  Synthetically generated peptide
  VARIANT (1)..(17): Xaa = Any Amino Acid
CCXXELACNPAXCTXGA

SEQ ID NO: 7300 - protein, 17 aa, Artificial Sequence
  Synthetically generated peptide
  VARIANT (1)..(17): Xaa = Any Amino Acid
CCXXELACNPAXCTGXA

SEQ ID NO: 7301 - protein, 16 aa, Artificial Sequence
  Synthetically generated peptide
  VARIANT (1)..(16): Xaa = Any Amino Acid
CCXXELACNPACXTGA

SEQ ID NO: 7302 - protein, 17 aa, Artificial Sequence
  Synthetically generated peptide
  VARIANT (1)..(17): Xaa = Any Amino Acid
CCXXELACNPACXXTGA

SEQ ID NO: 7303 - protein, 17 aa, Artificial Sequence
  Synthetically generated peptide
  VARIANT (1)..(17): Xaa = Any Amino Acid
CCXXELACNPACXTXGA

SEQ ID NO: 7304 - protein, 17 aa, Artificial Sequence
  Synthetically generated peptide
  VARIANT (1)..(17): Xaa = Any Amino Acid
CCXXELACNPACXTGXA

SEQ ID NO: 7305 - protein, 16 aa, Artificial Sequence
  Synthetically generated peptide
  VARIANT (1)..(16): Xaa = Any Amino Acid
CCXXELACNPACTXGA

SEQ ID NO: 7306 - protein, 17 aa, Artificial Sequence
  Synthetically generated peptide
  VARIANT (1)..(17): Xaa = Any Amino Acid
CCXXELACNPACTXXGA

SEQ ID NO: 7307 - protein, 17 aa, Artificial Sequence
  Synthetically generated peptide
  VARIANT (1)..(17): Xaa = Any Amino Acid
CCXXELACNPACTXGXA

SEQ ID NO: 7308 - protein, 16 aa, Artificial Sequence
  Synthetically generated peptide
  VARIANT (1)..(16): Xaa = Any Amino Acid
CCXXELACNPACTGXA

SEQ ID NO: 7309 - protein, 17 aa, Artificial Sequence
  Synthetically generated peptide
  VARIANT (1)..(17): Xaa = Any Amino Acid
CCXXELACNPACTGXXA

SEQ ID NO: 7310 - protein, 15 aa, Artificial Sequence
  Synthetically generated peptide
  VARIANT (1)..(15): Xaa = Any Amino Acid
CCXEXLACNPACTGA

SEQ ID NO: 7311 - protein, 16 aa, Artificial Sequence
  Synthetically generated peptide
  VARIANT (1)..(16): Xaa = Any Amino Acid
CCXEXXLACNPACTGA

SEQ ID NO: 7312 - protein, 17 aa, Artificial Sequence
  Synthetically generated peptide
  VARIANT (1)..(17): Xaa = Any Amino Acid
CCXEXXXLACNPACTGA

SEQ ID NO: 7313 - protein, 17 aa, Artificial Sequence
  Synthetically generated peptide
  VARIANT (1)..(17): Xaa = Any Amino Acid
CCXEXXLXACNPACTGA

SEQ ID NO: 7314 - protein, 17 aa, Artificial Sequence
  Synthetically generated peptide
  VARIANT (1)..(17): Xaa = Any Amino Acid
CCXEXXLACXNPACTGA

SEQ ID NO: 7315 - protein, 17 aa, Artificial Sequence
  Synthetically generated peptide
  VARIANT (1)..(17): Xaa = Any Amino Acid
CCXEXXLACNXPACTGA

SEQ ID NO: 7316 - protein, 17 aa, Artificial Sequence
  Synthetically generated peptide
  VARIANT (1)..(17): Xaa = Any Amino Acid
CCXEXXLACNPXACTGA

SEQ ID NO: 7317 - protein, 17 aa, Artificial Sequence
  Synthetically generated peptide
  VARIANT (1)..(17): Xaa = Any Amino Acid
CCXEXXLACNPAXCTGA

SEQ ID NO: 7318 - protein, 17 aa, Artificial Sequence
  Synthetically generated peptide
  VARIANT (1)..(17): Xaa = Any Amino Acid
CCXEXXLACNPACXTGA

SEQ ID NO: 7319 - protein, 17 aa, Artificial Sequence
  Synthetically generated peptide
  VARIANT (1)..(17): Xaa = Any Amino Acid
CCXEXXLACNPACTXGA

SEQ ID NO: 7320 - protein, 17 aa, Artificial Sequence
  Synthetically generated peptide
  VARIANT (1)..(17): Xaa = Any Amino Acid
CCXEXXLACNPACTGXA

SEQ ID NO: 7321 - protein, 16 aa, Artificial Sequence
  Synthetically generated peptide
  VARIANT (1)..(16): Xaa = Any Amino Acid
CCXEXLXACNPACTGA

SEQ ID NO: 7322 - protein, 17 aa, Artificial Sequence
  Synthetically generated peptide
  VARIANT (1)..(17): Xaa = Any Amino Acid
CCXEXLXXACNPACTGA

SEQ ID NO: 7323 - protein, 17 aa, Artificial Sequence
  Synthetically generated peptide
  VARIANT (1)..(17): Xaa = Any Amino Acid
CCXEXLXACXNPACTGA

SEQ ID NO: 7324 - protein, 17 aa, Artificial Sequence
  Synthetically generated peptide
  VARIANT (1)..(17): Xaa = Any Amino Acid
CCXEXLXACNXPACTGA

SEQ ID NO: 7325 - protein, 17 aa, Artificial Sequence
  Synthetically generated peptide
  VARIANT (1)..(17): Xaa = Any Amino Acid
CCXEXLXACNPXACTGA

SEQ ID NO: 7326 - protein, 17 aa, Artificial Sequence
  Synthetically generated peptide
  VARIANT (1)..(17): Xaa = Any Amino Acid
CCXEXLXACNPAXCTGA

SEQ ID NO: 7327 - protein, 17 aa, Artificial Sequence
  Synthetically generated peptide
  VARIANT (1)..(17): Xaa = Any Amino Acid
CCXEXLXACNPACXTGA

SEQ ID NO: 7328 - protein, 17 aa, Artificial Sequence
  Synthetically generated peptide
  VARIANT (1)..(17): Xaa = Any Amino Acid
CCXEXLXACNPACTXGA

SEQ ID NO: 7329 - protein, 17 aa, Artificial Sequence
  Synthetically generated peptide
  VARIANT (1)..(17): Xaa = Any Amino Acid
CCXEXLXACNPACTGXA

SEQ ID NO: 7330 - protein, 16 aa, Artificial Sequence
  Synthetically generated peptide
  VARIANT (1)..(16): Xaa = Any Amino Acid
CCXEXLACXNPACTGA

SEQ ID NO: 7331 - protein, 17 aa, Artificial Sequence
  Synthetically generated peptide
  VARIANT (1)..(17): Xaa = Any Amino Acid
CCXEXLACXXNPACTGA

SEQ ID NO: 7332 - protein, 17 aa, Artificial Sequence
  Synthetically generated peptide
  VARIANT (1)..(17): Xaa = Any Amino Acid
CCXEXLACXNXPACTGA

SEQ ID NO: 7333 - protein, 17 aa, Artificial Sequence
  Synthetically generated peptide
  VARIANT (1)..(17): Xaa = Any Amino Acid
CCXEXLACXNPXACTGA

SEQ ID NO: 7334 - protein, 17 aa, Artificial Sequence
  Synthetically generated peptide
  VARIANT (1)..(17): Xaa = Any Amino Acid
CCXEXLACXNPAXCTGA

SEQ ID NO: 7335 - protein, 17 aa, Artificial Sequence
  Synthetically generated peptide
  VARIANT (1)..(17): Xaa = Any Amino Acid
CCXEXLACXNPACXTGA

SEQ ID NO: 7336 - protein, 17 aa, Artificial Sequence
  Synthetically generated peptide
  VARIANT (1)..(17): Xaa = Any Amino Acid
CCXEXLACXNPACTXGA

SEQ ID NO: 7337 - protein, 17 aa, Artificial Sequence
  Synthetically generated peptide
  VARIANT (1)..(17): Xaa = Any Amino Acid
CCXEXLACXNPACTGXA

SEQ ID NO: 7338 - protein, 16 aa, Artificial Sequence
  Synthetically generated peptide
  VARIANT (1)..(16): Xaa = Any Amino Acid
CCXEXLACNXPACTGA

SEQ ID NO: 7339 - protein, 17 aa, Artificial Sequence
  Synthetically generated peptide
  VARIANT (1)..(17): Xaa = Any Amino Acid
CCXEXLACNXXPACTGA

SEQ ID NO: 7340 - protein, 17 aa, Artificial Sequence
  Synthetically generated peptide
  VARIANT (1)..(17): Xaa = Any Amino Acid
CCXEXLACNXPXACTGA

SEQ ID NO: 7341 - protein, 17 aa, Artificial Sequence
  Synthetically generated peptide
  VARIANT (1)..(17): Xaa = Any Amino Acid
CCXEXLACNXPAXCTGA

SEQ ID NO: 7342 - protein, 17 aa, Artificial Sequence
  Synthetically generated peptide
  VARIANT (1)..(17): Xaa = Any Amino Acid
CCXEXLACNXPACXTGA

SEQ ID NO: 7343 - protein, 17 aa, Artificial Sequence
  Synthetically generated peptide
  VARIANT (1)..(17): Xaa = Any Amino Acid
CCXEXLACNXPACTXGA

SEQ ID NO: 7344 - protein, 17 aa, Artificial Sequence
  Synthetically generated peptide
  VARIANT (1)..(17): Xaa = Any Amino Acid
CCXEXLACNXPACTGXA

SEQ ID NO: 7345 - protein, 16 aa, Artificial Sequence
  Synthetically generated peptide
  VARIANT (1)..(16): Xaa = Any Amino Acid
CCXEXLACNPXACTGA

SEQ ID NO: 7346 - protein, 17 aa, Artificial Sequence
  Synthetically generated peptide
  VARIANT (1)..(17): Xaa = Any Amino Acid
CCXEXLACNPXXACTGA

SEQ ID NO: 7347 - protein, 17 aa, Artificial Sequence
  Synthetically generated peptide
  VARIANT (1)..(17): Xaa = Any Amino Acid
CCXEXLACNPXAXCTGA

SEQ ID NO: 7348 - protein, 17 aa, Artificial Sequence
  Synthetically generated peptide
  VARIANT (1)..(17): Xaa = Any Amino Acid
CCXEXLACNPXACXTGA

SEQ ID NO: 7349 - protein, 17 aa, Artificial Sequence
  Synthetically generated peptide
  VARIANT (1)..(17): Xaa = Any Amino Acid
CCXEXLACNPXACTXGA

SEQ ID NO: 7350 - protein, 17 aa, Artificial Sequence
  Synthetically generated peptide
  VARIANT (1)..(17): Xaa = Any Amino Acid
CCXEXLACNPXACTGXA

SEQ ID NO: 7351 - protein, 16 aa, Artificial Sequence
  Synthetically generated peptide
  VARIANT (1)..(16): Xaa = Any Amino Acid
CCXEXLACNPAXCTGA

SEQ ID NO: 7352 - protein, 17 aa, Artificial Sequence
  Synthetically generated peptide
  VARIANT (1)..(17): Xaa = Any Amino Acid
CCXEXLACNPAXXCTGA

SEQ ID NO: 7353 - protein, 17 aa, Artificial Sequence
  Synthetically generated peptide
  VARIANT (1)..(17): Xaa = Any Amino Acid
CCXEXLACNPAXCXTGA

SEQ ID NO: 7354 - protein, 17 aa, Artificial Sequence
  Synthetically generated peptide
  VARIANT (1)..(17): Xaa = Any Amino Acid
CCXEXLACNPAXCTXGA

SEQ ID NO: 7355 - protein, 17 aa, Artificial Sequence
  Synthetically generated peptide
  VARIANT (1)..(17): Xaa = Any Amino Acid
CCXEXLACNPAXCTGXA

SEQ ID NO: 7356 - protein, 16 aa, Artificial Sequence
  Synthetically generated peptide
  VARIANT (1)..(16): Xaa = Any Amino Acid
CCXEXLACNPACXTGA

SEQ ID NO: 7357 - protein, 17 aa, Artificial Sequence
  Synthetically generated peptide
  VARIANT (1)..(17): Xaa = Any Amino Acid
CCXEXLACNPACXXTGA

SEQ ID NO: 7358 - protein, 17 aa, Artificial Sequence
  Synthetically generated peptide
  VARIANT (1)..(17): Xaa = Any Amino Acid
CCXEXLACNPACXTXGA

SEQ ID NO: 7359 - protein, 17 aa, Artificial Sequence
  Synthetically generated peptide
  VARIANT (1)..(17): Xaa = Any Amino Acid
CCXEXLACNPACXTGXA

SEQ ID NO: 7360 - protein, 16 aa, Artificial Sequence
  Synthetically generated peptide
  VARIANT (1)..(16): Xaa = Any Amino Acid
CCXEXLACNPACTXGA

SEQ ID NO: 7361 - protein, 17 aa, Artificial Sequence
  Synthetically generated peptide
  VARIANT (1)..(17): Xaa = Any Amino Acid
CCXEXLACNPACTXXGA

SEQ ID NO: 7362 - protein, 17 aa, Artificial Sequence
  Synthetically generated peptide
  VARIANT (1)..(17): Xaa = Any Amino Acid
CCXEXLACNPACTXGXA

SEQ ID NO: 7363 - protein, 16 aa, Artificial Sequence
  Synthetically generated peptide
  VARIANT (1)..(16): Xaa = Any Amino Acid
CCXEXLACNPACTGXA

SEQ ID NO: 7364 - protein, 17 aa, Artificial Sequence
  Synthetically generated peptide
  VARIANT (1)..(17): Xaa = Any Amino Acid
CCXEXLACNPACTGXXA

SEQ ID NO: 7365 - protein, 15 aa, Artificial Sequence
  Synthetically generated peptide
  VARIANT (1)..(15): Xaa = Any Amino Acid
CCXELXACNPACTGA

SEQ ID NO: 7366 - protein, 16 aa, Artificial Sequence
  Synthetically generated peptide
  VARIANT (1)..(16): Xaa = Any Amino Acid
CCXELXXACNPACTGA

SEQ ID NO: 7367 - protein, 17 aa, Artificial Sequence
  Synthetically generated peptide
  VARIANT (1)..(17): Xaa = Any Amino Acid
CCXELXXXACNPACTGA

SEQ ID NO: 7368 - protein, 17 aa, Artificial Sequence
  Synthetically generated peptide
  VARIANT (1)..(17): Xaa = Any Amino Acid
CCXELXXACXNPACTGA

SEQ ID NO: 7369 - protein, 17 aa, Artificial Sequence
  Synthetically generated peptide
  VARIANT (1)..(17): Xaa = Any Amino Acid
CCXELXXACNXPACTGA

SEQ ID NO: 7370 - protein, 17 aa, Artificial Sequence
  Synthetically generated peptide
  VARIANT (1)..(17): Xaa = Any Amino Acid
CCXELXXACNPXACTGA

SEQ ID NO: 7371 - protein, 17 aa, Artificial Sequence
  Synthetically generated peptide
  VARIANT (1)..(17): Xaa = Any Amino Acid
CCXELXXACNPAXCTGA

SEQ ID NO: 7372 - protein, 17 aa, Artificial Sequence
  Synthetically generated peptide
  VARIANT (1)..(17): Xaa = Any Amino Acid
CCXELXXACNPACXTGA

SEQ ID NO: 7373 - protein, 17 aa, Artificial Sequence
  Synthetically generated peptide
  VARIANT (1)..(17): Xaa = Any Amino Acid
CCXELXXACNPACTXGA

SEQ ID NO: 7374 - protein, 17 aa, Artificial Sequence
  Synthetically generated peptide
  VARIANT (1)..(17): Xaa = Any Amino Acid
CCXELXXACNPACTGXA

SEQ ID NO: 7375 - protein, 16 aa, Artificial Sequence
  Synthetically generated peptide
  VARIANT (1)..(16): Xaa = Any Amino Acid
CCXELXACXNPACTGA

SEQ ID NO: 7376 - protein, 17 aa, Artificial Sequence
  Synthetically generated peptide
  VARIANT (1)..(17): Xaa = Any Amino Acid
CCXELXACXXNPACTGA

SEQ ID NO: 7377 - protein, 17 aa, Artificial Sequence
  Synthetically generated peptide
  VARIANT (1)..(17): Xaa = Any Amino Acid
CCXELXACXNXPACTGA

SEQ ID NO: 7378 - protein, 17 aa, Artificial Sequence
  Synthetically generated peptide
  VARIANT (1)..(17): Xaa = Any Amino Acid
CCXELXACXNPXACTGA

SEQ ID NO: 7379 - protein, 17 aa, Artificial Sequence
  Synthetically generated peptide
  VARIANT (1)..(17): Xaa = Any Amino Acid
CCXELXACXNPAXCTGA

SEQ ID NO: 7380 - protein, 17 aa, Artificial Sequence
  Synthetically generated peptide
  VARIANT (1)..(17): Xaa = Any Amino Acid
CCXELXACXNPACXTGA

SEQ ID NO: 7381 - protein, 17 aa, Artificial Sequence
  Synthetically generated peptide
  VARIANT (1)..(17): Xaa = Any Amino Acid
CCXELXACXNPACTXGA

SEQ ID NO: 7382 - protein, 17 aa, Artificial Sequence
  Synthetically generated peptide
  VARIANT (1)..(17): Xaa = Any Amino Acid
CCXELXACXNPACTGXA

SEQ ID NO: 7383 - protein, 16 aa, Artificial Sequence
  Synthetically generated peptide
  VARIANT (1)..(16): Xaa = Any Amino Acid
CCXELXACNXPACTGA

SEQ ID NO: 7384 - protein, 17 aa, Artificial Sequence
  Synthetically generated peptide
  VARIANT (1)..(17): Xaa = Any Amino Acid
CCXELXACNXXPACTGA

SEQ ID NO: 7385 - protein, 17 aa, Artificial Sequence
  Synthetically generated peptide
  VARIANT (1)..(17): Xaa = Any Amino Acid
CCXELXACNXPXACTGA

SEQ ID NO: 7386 - protein, 17 aa, Artificial Sequence
  Synthetically generated peptide
  VARIANT (1)..(17): Xaa = Any Amino Acid
CCXELXACNXPAXCTGA

SEQ ID NO: 7387 - protein, 17 aa, Artificial Sequence
  Synthetically generated peptide
  VARIANT (1)..(17): Xaa = Any Amino Acid
CCXELXACNXPACXTGA

SEQ ID NO: 7388 - protein, 17 aa, Artificial Sequence
  Synthetically generated peptide
  VARIANT (1)..(17): Xaa = Any Amino Acid
CCXELXACNXPACTXGA

SEQ ID NO: 7389 - protein, 17 aa, Artificial Sequence
  Synthetically generated peptide
  VARIANT (1)..(17): Xaa = Any Amino Acid
CCXELXACNXPACTGXA

SEQ ID NO: 7390 - protein, 16 aa, Artificial Sequence
  Synthetically generated peptide
  VARIANT (1)..(16): Xaa = Any Amino Acid
CCXELXACNPXACTGA

SEQ ID NO: 7391 - protein, 17 aa, Artificial Sequence
  Synthetically generated peptide
  VARIANT (1)..(17): Xaa = Any Amino Acid
CCXELXACNPXXACTGA

SEQ ID NO: 7392 - protein, 17 aa, Artificial Sequence
  Synthetically generated peptide
  VARIANT (1)..(17): Xaa = Any Amino Acid
CCXELXACNPXAXCTGA

SEQ ID NO: 7393 - protein, 17 aa, Artificial Sequence
  Synthetically generated peptide
  VARIANT (1)..(17): Xaa = Any Amino Acid
CCXELXACNPXACXTGA

SEQ ID NO: 7394 - protein, 17 aa, Artificial Sequence
  Synthetically generated peptide
  VARIANT (1)..(17): Xaa = Any Amino Acid
CCXELXACNPXACTXGA

SEQ ID NO: 7395 - protein, 17 aa, Artificial Sequence
  Synthetically generated peptide
  VARIANT (1)..(17): Xaa = Any Amino Acid
CCXELXACNPXACTGXA

SEQ ID NO: 7396 - protein, 16 aa, Artificial Sequence
  Synthetically generated peptide
  VARIANT (1)..(16): Xaa = Any Amino Acid
CCXELXACNPAXCTGA

SEQ ID NO: 7397 - protein, 17 aa, Artificial Sequence
  Synthetically generated peptide
  VARIANT (1)..(17): Xaa = Any Amino Acid
CCXELXACNPAXXCTGA

SEQ ID NO: 7398 - protein, 17 aa, Artificial Sequence
  Synthetically generated peptide
  VARIANT (1)..(17): Xaa = Any Amino Acid
CCXELXACNPAXCXTGA

SEQ ID NO: 7399 - protein, 17 aa, Artificial Sequence
  Synthetically generated peptide
  VARIANT (1)..(17): Xaa = Any Amino Acid
CCXELXACNPAXCTXGA

SEQ ID NO: 7400 - protein, 17 aa, Artificial Sequence
  Synthetically generated peptide
  VARIANT (1)..(17): Xaa = Any Amino Acid
CCXELXACNPAXCTGXA

SEQ ID NO: 7401 - protein, 16 aa, Artificial Sequence
  Synthetically generated peptide
  VARIANT (1)..(16): Xaa = Any Amino Acid
CCXELXACNPACXTGA

SEQ ID NO: 7402 - protein, 17 aa, Artificial Sequence
  Synthetically generated peptide
  VARIANT (1)..(17): Xaa = Any Amino Acid
CCXELXACNPACXXTGA

SEQ ID NO: 7403 - protein, 17 aa, Artificial Sequence
  Synthetically generated peptide
  VARIANT (1)..(17): Xaa = Any Amino Acid
CCXELXACNPACXTXGA

SEQ ID NO: 7404 - protein, 17 aa, Artificial Sequence
  Synthetically generated peptide
  VARIANT (1)..(17): Xaa = Any Amino Acid
CCXELXACNPACXTGXA

SEQ ID NO: 7405 - protein, 16 aa, Artificial Sequence
  Synthetically generated peptide
  VARIANT (1)..(16): Xaa = Any Amino Acid
CCXELXACNPACTXGA

SEQ ID NO: 7406 - protein, 17 aa, Artificial Sequence
  Synthetically generated peptide
  VARIANT (1)..(17): Xaa = Any Amino Acid
CCXELXACNPACTXXGA

SEQ ID NO: 7407 - protein, 17 aa, Artificial Sequence
  Synthetically generated peptide
  VARIANT (1)..(17): Xaa = Any Amino Acid
CCXELXACNPACTXGXA

SEQ ID NO: 7408 - protein, 16 aa, Artificial Sequence
  Synthetically generated peptide
  VARIANT (1)..(16): Xaa = Any Amino Acid
CCXELXACNPACTGXA

SEQ ID NO: 7409 - protein, 17 aa, Artificial Sequence
  Synthetically generated peptide
  VARIANT (1)..(17): Xaa = Any Amino Acid
CCXELXACNPACTGXXA

SEQ ID NO: 7410 - protein, 15 aa, Artificial Sequence
  Synthetically generated peptide
  VARIANT (1)..(15): Xaa = Any Amino Acid
CCXELACXNPACTGA

SEQ ID NO: 7411 - protein, 16 aa, Artificial Sequence
  Synthetically generated peptide
  VARIANT (1)..(16): Xaa = Any Amino Acid
CCXELACXXNPACTGA

SEQ ID NO: 7412 - protein, 17 aa, Artificial Sequence
  Synthetically generated peptide
  VARIANT (1)..(17): Xaa = Any Amino Acid
CCXELACXXXNPACTGA

SEQ ID NO: 7413 - protein, 17 aa, Artificial Sequence
  Synthetically generated peptide
  VARIANT (1)..(17): Xaa = Any Amino Acid
CCXELACXXNXPACTGA

SEQ ID NO: 7414 - protein, 17 aa, Artificial Sequence
  Synthetically generated peptide
  VARIANT (1)..(17): Xaa = Any Amino Acid
CCXELACXXNPXACTGA

SEQ ID NO: 7415 - protein, 17 aa, Artificial Sequence
  Synthetically generated peptide
  VARIANT (1)..(17): Xaa = Any Amino Acid
CCXELACXXNPAXCTGA

SEQ ID NO: 7416 - protein, 17 aa, Artificial Sequence
  Synthetically generated peptide
  VARIANT (1)..(17): Xaa = Any Amino Acid
CCXELACXXNPACXTGA

SEQ ID NO: 7417 - protein, 17 aa, Artificial Sequence
  Synthetically generated peptide
  VARIANT (1)..(17): Xaa = Any Amino Acid
CCXELACXXNPACTXGA

SEQ ID NO: 7418 - protein, 17 aa, Artificial Sequence
  Synthetically generated peptide
  VARIANT (1)..(17): Xaa = Any Amino Acid
CCXELACXXNPACTGXA

SEQ ID NO: 7419 - protein, 16 aa, Artificial Sequence
  Synthetically generated peptide
  VARIANT (1)..(16): Xaa = Any Amino Acid
CCXELACXNXPACTGA

SEQ ID NO: 7420 - protein, 17 aa, Artificial Sequence
  Synthetically generated peptide
  VARIANT (1)..(17): Xaa = Any Amino Acid
CCXELACXNXXPACTGA

SEQ ID NO: 7421 - protein, 17 aa, Artificial Sequence
  Synthetically generated peptide
  VARIANT (1)..(17): Xaa = Any Amino Acid
CCXELACXNXPXACTGA

SEQ ID NO: 7422 - protein, 17 aa, Artificial Sequence
  Synthetically generated peptide
  VARIANT (1)..(17): Xaa = Any Amino Acid
CCXELACXNXPAXCTGA

SEQ ID NO: 7423 - protein, 17 aa, Artificial Sequence
  Synthetically generated peptide
  VARIANT (1)..(17): Xaa = Any Amino Acid
CCXELACXNXPACXTGA

SEQ ID NO: 7424 - protein, 17 aa, Artificial Sequence
  Synthetically generated peptide
  VARIANT (1)..(17): Xaa = Any Amino Acid
CCXELACXNXPACTXGA

SEQ ID NO: 7425 - protein, 17 aa, Artificial Sequence
  Synthetically generated peptide
  VARIANT (1)..(17): Xaa = Any Amino Acid
CCXELACXNXPACTGXA

SEQ ID NO: 7426 - protein, 16 aa, Artificial Sequence
  Synthetically generated peptide
  VARIANT (1)..(16): Xaa = Any Amino Acid
CCXELACXNPXACTGA

SEQ ID NO: 7427 - protein, 17 aa, Artificial Sequence
  Synthetically generated peptide
  VARIANT (1)..(17): Xaa = Any Amino Acid
CCXELACXNPXXACTGA

SEQ ID NO: 7428 - protein, 17 aa, Artificial Sequence
  Synthetically generated peptide
  VARIANT (1)..(17): Xaa = Any Amino Acid
CCXELACXNPXAXCTGA

SEQ ID NO: 7429 - protein, 17 aa, Artificial Sequence
  Synthetically generated peptide
  VARIANT (1)..(17): Xaa = Any Amino Acid
CCXELACXNPXACXTGA

SEQ ID NO: 7430 - protein, 17 aa, Artificial Sequence
  Synthetically generated peptide
  VARIANT (1)..(17): Xaa = Any Amino Acid
CCXELACXNPXACTXGA

SEQ ID NO: 7431 - protein, 17 aa, Artificial Sequence
  Synthetically generated peptide
  VARIANT (1)..(17): Xaa = Any Amino Acid
CCXELACXNPXACTGXA

SEQ ID NO: 7432 - protein, 16 aa, Artificial Sequence
  Synthetically generated peptide
  VARIANT (1)..(16): Xaa = Any Amino Acid
CCXELACXNPAXCTGA

SEQ ID NO: 7433 - protein, 17 aa, Artificial Sequence
  Synthetically generated peptide
  VARIANT (1)..(17): Xaa = Any Amino Acid
CCXELACXNPAXXCTGA

SEQ ID NO: 7434 - protein, 17 aa, Artificial Sequence
  Synthetically generated peptide
  VARIANT (1)..(17): Xaa = Any Amino Acid
CCXELACXNPAXCXTGA

SEQ ID NO: 7435 - protein, 17 aa, Artificial Sequence
  Synthetically generated peptide
  VARIANT (1)..(17): Xaa = Any Amino Acid
CCXELACXNPAXCTXGA

SEQ ID NO: 7436 - protein, 17 aa, Artificial Sequence
  Synthetically generated peptide
  VARIANT (1)..(17): Xaa = Any Amino Acid
CCXELACXNPAXCTGXA

SEQ ID NO: 7437 - protein, 16 aa, Artificial Sequence
  Synthetically generated peptide
  VARIANT (1)..(16): Xaa = Any Amino Acid
CCXELACXNPACXTGA

SEQ ID NO: 7438 - protein, 17 aa, Artificial Sequence
  Synthetically generated peptide
  VARIANT (1)..(17): Xaa = Any Amino Acid
CCXELACXNPACXXTGA

SEQ ID NO: 7439 - protein, 17 aa, Artificial Sequence
  Synthetically generated peptide
  VARIANT (1)..(17): Xaa = Any Amino Acid
CCXELACXNPACXTXGA

SEQ ID NO: 7440 - protein, 17 aa, Artificial Sequence
  Synthetically generated peptide
  VARIANT (1)..(17): Xaa = Any Amino Acid
CCXELACXNPACXTGXA

SEQ ID NO: 7441 - protein, 16 aa, Artificial Sequence
  Synthetically generated peptide
  VARIANT (1)..(16): Xaa = Any Amino Acid
CCXELACXNPACTXGA

SEQ ID NO: 7442 - protein, 17 aa, Artificial Sequence
  Synthetically generated peptide
  VARIANT (1)..(17): Xaa = Any Amino Acid
CCXELACXNPACTXXGA

SEQ ID NO: 7443 - protein, 17 aa, Artificial Sequence
  Synthetically generated peptide
  VARIANT (1)..(17): Xaa = Any Amino Acid
CCXELACXNPACTXGXA

SEQ ID NO: 7444 - protein, 16 aa, Artificial Sequence
  Synthetically generated peptide
  VARIANT (1)..(16): Xaa = Any Amino Acid
CCXELACXNPACTGXA

SEQ ID NO: 7445 - protein, 17 aa, Artificial Sequence
  Synthetically generated peptide
  VARIANT (1)..(17): Xaa = Any Amino Acid
CCXELACXNPACTGXXA

SEQ ID NO: 7446 - protein, 15 aa, Artificial Sequence
  Synthetically generated peptide
  VARIANT (1)..(15): Xaa = Any Amino Acid
CCXELACNXPACTGA

SEQ ID NO: 7447 - protein, 16 aa, Artificial Sequence
  Synthetically generated peptide
  VARIANT (1)..(16): Xaa = Any Amino Acid
CCXELACNXXPACTGA

SEQ ID NO: 7448 - protein, 17 aa, Artificial Sequence
  Synthetically generated peptide
  VARIANT (1)..(17): Xaa = Any Amino Acid
CCXELACNXXXPACTGA

SEQ ID NO: 7449 - protein, 17 aa, Artificial Sequence
  Synthetically generated peptide
  VARIANT (1)..(17): Xaa = Any Amino Acid
CCXELACNXXPXACTGA

SEQ ID NO: 7450 - protein, 17 aa, Artificial Sequence
  Synthetically generated peptide
  VARIANT (1)..(17): Xaa = Any Amino Acid
CCXELACNXXPAXCTGA

SEQ ID NO: 7451 - protein, 17 aa, Artificial Sequence
  Synthetically generated peptide
  VARIANT (1)..(17): Xaa = Any Amino Acid
CCXELACNXXPACXTGA

SEQ ID NO: 7452 - protein, 17 aa, Artificial Sequence
  Synthetically generated peptide
  VARIANT (1)..(17): Xaa = Any Amino Acid
CCXELACNXXPACTXGA

SEQ ID NO: 7453 - protein, 17 aa, Artificial Sequence
  Synthetically generated peptide
  VARIANT (1)..(17): Xaa = Any Amino Acid
CCXELACNXXPACTGXA

SEQ ID NO: 7454 - protein, 16 aa, Artificial Sequence
  Synthetically generated peptide
  VARIANT (1)..(16): Xaa = Any Amino Acid
CCXELACNXPXACTGA

SEQ ID NO: 7455 - protein, 17 aa, Artificial Sequence
  Synthetically generated peptide
  VARIANT (1)..(17): Xaa = Any Amino Acid
CCXELACNXPXXACTGA

SEQ ID NO: 7456 - protein, 17 aa, Artificial Sequence
  Synthetically generated peptide
  VARIANT (1)..(17): Xaa = Any Amino Acid
CCXELACNXPXAXCTGA

SEQ ID NO: 7457 - protein, 17 aa, Artificial Sequence
  Synthetically generated peptide
  VARIANT (1)..(17): Xaa = Any Amino Acid
CCXELACNXPXACXTGA

SEQ ID NO: 7458 - protein, 17 aa, Artificial Sequence
  Synthetically generated peptide
  VARIANT (1)..(17): Xaa = Any Amino Acid
CCXELACNXPXACTXGA

SEQ ID NO: 7459 - protein, 17 aa, Artificial Sequence
  Synthetically generated peptide
  VARIANT (1)..(17): Xaa = Any Amino Acid
CCXELACNXPXACTGXA

SEQ ID NO: 7460 - protein, 16 aa, Artificial Sequence
  Synthetically generated peptide
  VARIANT (1)..(16): Xaa = Any Amino Acid
CCXELACNXPAXCTGA

SEQ ID NO: 7461 - protein, 17 aa, Artificial Sequence
  Synthetically generated peptide
  VARIANT (1)..(17): Xaa = Any Amino Acid
CCXELACNXPAXXCTGA

SEQ ID NO: 7462 - protein, 17 aa, Artificial Sequence
  Synthetically generated peptide
  VARIANT (1)..(17): Xaa = Any Amino Acid
CCXELACNXPAXCXTGA

SEQ ID NO: 7463 - protein, 17 aa, Artificial Sequence
  Synthetically generated peptide
  VARIANT (1)..(17): Xaa = Any Amino Acid
CCXELACNXPAXCTXGA

SEQ ID NO: 7464 - protein, 17 aa, Artificial Sequence
  Synthetically generated peptide
  VARIANT (1)..(17): Xaa = Any Amino Acid
CCXELACNXPAXCTGXA

SEQ ID NO: 7465 - protein, 16 aa, Artificial Sequence
  Synthetically generated peptide
  VARIANT (1)..(16): Xaa = Any Amino Acid
CCXELACNXPACXTGA

SEQ ID NO: 7466 - protein, 17 aa, Artificial Sequence
  Synthetically generated peptide
  VARIANT (1)..(17): Xaa = Any Amino Acid
CCXELACNXPACXXTGA

SEQ ID NO: 7467 - protein, 17 aa, Artificial Sequence
  Synthetically generated peptide
  VARIANT (1)..(17): Xaa = Any Amino Acid
CCXELACNXPACXTXGA

SEQ ID NO: 7468 - protein, 17 aa, Artificial Sequence
  Synthetically generated peptide
  VARIANT (1)..(17): Xaa = Any Amino Acid
CCXELACNXPACXTGXA

SEQ ID NO: 7469 - protein, 16 aa, Artificial Sequence
  Synthetically generated peptide
  VARIANT (1)..(16): Xaa = Any Amino Acid
CCXELACNXPACTXGA

SEQ ID NO: 7470 - protein, 17 aa, Artificial Sequence
  Synthetically generated peptide
  VARIANT (1)..(17): Xaa = Any Amino Acid
CCXELACNXPACTXXGA

SEQ ID NO: 7471 - protein, 17 aa, Artificial Sequence
  Synthetically generated peptide
  VARIANT (1)..(17): Xaa = Any Amino Acid
CCXELACNXPACTXGXA

SEQ ID NO: 7472 - protein, 16 aa, Artificial Sequence
  Synthetically generated peptide
  VARIANT (1)..(16): Xaa = Any Amino Acid
CCXELACNXPACTGXA

SEQ ID NO: 7473 - protein, 17 aa, Artificial Sequence
  Synthetically generated peptide
  VARIANT (1)..(17): Xaa = Any Amino Acid
CCXELACNXPACTGXXA

SEQ ID NO: 7474 - protein, 15 aa, Artificial Sequence
  Synthetically generated peptide
  VARIANT (1)..(15): Xaa = Any Amino Acid
CCXELACNPXACTGA

SEQ ID NO: 7475 - protein, 16 aa, Artificial Sequence
  Synthetically generated peptide
  VARIANT (1)..(16): Xaa = Any Amino Acid
CCXELACNPXXACTGA

SEQ ID NO: 7476 - protein, 17 aa, Artificial Sequence
  Synthetically generated peptide
  VARIANT (1)..(17): Xaa = Any Amino Acid
CCXELACNPXXXACTGA

SEQ ID NO: 7477 - protein, 17 aa, Artificial Sequence
  Synthetically generated peptide
  VARIANT (1)..(17): Xaa = Any Amino Acid
CCXELACNPXXAXCTGA

SEQ ID NO: 7478 - protein, 17 aa, Artificial Sequence
  Synthetically generated peptide
  VARIANT (1)..(17): Xaa = Any Amino Acid
CCXELACNPXXACXTGA

SEQ ID NO: 7479 - protein, 17 aa, Artificial Sequence
  Synthetically generated peptide
  VARIANT (1)..(17): Xaa = Any Amino Acid
CCXELACNPXXACTXGA

SEQ ID NO: 7480 - protein, 17 aa, Artificial Sequence
  Synthetically generated peptide
  VARIANT (1)..(17): Xaa = Any Amino Acid
CCXELACNPXXACTGXA

SEQ ID NO: 7481 - protein, 16 aa, Artificial Sequence
  Synthetically generated peptide
  VARIANT (1)..(16): Xaa = Any Amino Acid
CCXELACNPXAXCTGA

SEQ ID NO: 7482 - protein, 17 aa, Artificial Sequence
  Synthetically generated peptide
  VARIANT (1)..(17): Xaa = Any Amino Acid
CCXELACNPXAXXCTGA

SEQ ID NO: 7483 - protein, 17 aa, Artificial Sequence
  Synthetically generated peptide
  VARIANT (1)..(17): Xaa = Any Amino Acid
CCXELACNPXAXCXTGA

SEQ ID NO: 7484 - protein, 17 aa, Artificial Sequence
  Synthetically generated peptide
  VARIANT (1)..(17): Xaa = Any Amino Acid
CCXELACNPXAXCTXGA

SEQ ID NO: 7485 - protein, 17 aa, Artificial Sequence
  Synthetically generated peptide
  VARIANT (1)..(17): Xaa = Any Amino Acid
CCXELACNPXAXCTGXA

SEQ ID NO: 7486 - protein, 16 aa, Artificial Sequence
  Synthetically generated peptide
  VARIANT (1)..(16): Xaa = Any Amino Acid
CCXELACNPXACXTGA

SEQ ID NO: 7487 - protein, 17 aa, Artificial Sequence
  Synthetically generated peptide
  VARIANT (1)..(17): Xaa = Any Amino Acid
CCXELACNPXACXXTGA

SEQ ID NO: 7488 - protein, 17 aa, Artificial Sequence
  Synthetically generated peptide
  VARIANT (1)..(17): Xaa = Any Amino Acid
CCXELACNPXACXTXGA

SEQ ID NO: 7489 - protein, 17 aa, Artificial Sequence
  Synthetically generated peptide
  VARIANT (1)..(17): Xaa = Any Amino Acid
CCXELACNPXACXTGXA

SEQ ID NO: 7490 - protein, 16 aa, Artificial Sequence
  Synthetically generated peptide
  VARIANT (1)..(16): Xaa = Any Amino Acid
CCXELACNPXACTXGA

SEQ ID NO: 7491 - protein, 17 aa, Artificial Sequence
  Synthetically generated peptide
  VARIANT (1)..(17): Xaa = Any Amino Acid
CCXELACNPXACTXXGA

SEQ ID NO: 7492 - protein, 17 aa, Artificial Sequence
  Synthetically generated peptide
  VARIANT (1)..(17): Xaa = Any Amino Acid
CCXELACNPXACTXGXA

SEQ ID NO: 7493 - protein, 16 aa, Artificial Sequence
  Synthetically generated peptide
  VARIANT (1)..(16): Xaa = Any Amino Acid
CCXELACNPXACTGXA

SEQ ID NO: 7494 - protein, 17 aa, Artificial Sequence
  Synthetically generated peptide
  VARIANT (1)..(17): Xaa = Any Amino Acid
CCXELACNPXACTGXXA

SEQ ID NO: 7495 - protein, 15 aa, Artificial Sequence
  Synthetically generated peptide
  VARIANT (1)..(15): Xaa = Any Amino Acid
CCXELACNPAXCTGA

SEQ ID NO: 7496 - protein, 16 aa, Artificial Sequence
  Synthetically generated peptide
  VARIANT (1)..(16): Xaa = Any Amino Acid
CCXELACNPAXXCTGA

SEQ ID NO: 7497 - protein, 17 aa, Artificial Sequence
  Synthetically generated peptide
  VARIANT (1)..(17): Xaa = Any Amino Acid
CCXELACNPAXXXCTGA

SEQ ID NO: 7498 - protein, 17 aa, Artificial Sequence
  Synthetically generated peptide
  VARIANT (1)..(17): Xaa = Any Amino Acid
CCXELACNPAXXCXTGA

SEQ ID NO: 7499 - protein, 17 aa, Artificial Sequence
  Synthetically generated peptide
  VARIANT (1)..(17): Xaa = Any Amino Acid
CCXELACNPAXXCTXGA

SEQ ID NO: 7500 - protein, 17 aa, Artificial Sequence
  Synthetically generated peptide
  VARIANT (1)..(17): Xaa = Any Amino Acid
CCXELACNPAXXCTGXA

SEQ ID NO: 7501 - protein, 16 aa, Artificial Sequence
  Synthetically generated peptide
  VARIANT (1)..(16): Xaa = Any Amino Acid
CCXELACNPAXCXTGA

SEQ ID NO: 7502 - protein, 17 aa, Artificial Sequence
  Synthetically generated peptide
  VARIANT (1)..(17): Xaa = Any Amino Acid
CCXELACNPAXCXXTGA

SEQ ID NO: 7503 - protein, 17 aa, Artificial Sequence
  Synthetically generated peptide
  VARIANT (1)..(17): Xaa = Any Amino Acid
CCXELACNPAXCXTXGA

SEQ ID NO: 7504 - protein, 17 aa, Artificial Sequence
  Synthetically generated peptide
  VARIANT (1)..(17): Xaa = Any Amino Acid
CCXELACNPAXCXTGXA

SEQ ID NO: 7505 - protein, 16 aa, Artificial Sequence
  Synthetically generated peptide
  VARIANT (1)..(16): Xaa = Any Amino Acid
CCXELACNPAXCTXGA

SEQ ID NO: 7506 - protein, 17 aa, Artificial Sequence
  Synthetically generated peptide
  VARIANT (1)..(17): Xaa = Any Amino Acid
CCXELACNPAXCTXXGA

SEQ ID NO: 7507 - protein, 17 aa, Artificial Sequence
  Synthetically generated peptide
  VARIANT (1)..(17): Xaa = Any Amino Acid
CCXELACNPAXCTXGXA

SEQ ID NO: 7508 - protein, 16 aa, Artificial Sequence
  Synthetically generated peptide
  VARIANT (1)..(16): Xaa = Any Amino Acid
CCXELACNPAXCTGXA

SEQ ID NO: 7509 - protein, 17 aa, Artificial Sequence
  Synthetically generated peptide
  VARIANT (1)..(17): Xaa = Any Amino Acid
CCXELACNPAXCTGXXA

SEQ ID NO: 7510 - protein, 15 aa, Artificial Sequence
  Synthetically generated peptide
  VARIANT (1)..(15): Xaa = Any Amino Acid
CCXELACNPACXTGA

SEQ ID NO: 7511 - protein, 16 aa, Artificial Sequence
  Synthetically generated peptide
  VARIANT (1)..(16): Xaa = Any Amino Acid
CCXELACNPACXXTGA

SEQ ID NO: 7512 - protein, 17 aa, Artificial Sequence
  Synthetically generated peptide
  VARIANT (1)..(17): Xaa = Any Amino Acid
CCXELACNPACXXXTGA

SEQ ID NO: 7513 - protein, 17 aa, Artificial Sequence
  Synthetically generated peptide
  VARIANT (1)..(17): Xaa = Any Amino Acid
CCXELACNPACXXTXGA

SEQ ID NO: 7514 - protein, 17 aa, Artificial Sequence
  Synthetically generated peptide
  VARIANT (1)..(17): Xaa = Any Amino Acid
CCXELACNPACXXTGXA

SEQ ID NO: 7515 - protein, 16 aa, Artificial Sequence
  Synthetically generated peptide
  VARIANT (1)..(16): Xaa = Any Amino Acid
CCXELACNPACXTXGA

SEQ ID NO: 7516 - protein, 17 aa, Artificial Sequence
  Synthetically generated peptide
  VARIANT (1)..(17): Xaa = Any Amino Acid
CCXELACNPACXTXXGA

SEQ ID NO: 7517 - protein, 17 aa, Artificial Sequence
  Synthetically generated peptide
  VARIANT (1)..(17): Xaa = Any Amino Acid
CCXELACNPACXTXGXA

SEQ ID NO: 7518 - protein, 16 aa, Artificial Sequence
  Synthetically generated peptide
  VARIANT (1)..(16): Xaa = Any Amino Acid
CCXELACNPACXTGXA

SEQ ID NO: 7519 - protein, 17 aa, Artificial Sequence
  Synthetically generated peptide
  VARIANT (1)..(17): Xaa = Any Amino Acid
CCXELACNPACXTGXXA

SEQ ID NO: 7520 - protein, 15 aa, Artificial Sequence
  Synthetically generated peptide
  VARIANT (1)..(15): Xaa = Any Amino Acid
CCXELACNPACTXGA

SEQ ID NO: 7521 - protein, 16 aa, Artificial Sequence
  Synthetically generated peptide
  VARIANT (1)..(16): Xaa = Any Amino Acid
CCXELACNPACTXXGA

SEQ ID NO: 7522 - protein, 17 aa, Artificial Sequence
  Synthetically generated peptide
  VARIANT (1)..(17): Xaa = Any Amino Acid
CCXELACNPACTXXXGA

SEQ ID NO: 7523 - protein, 17 aa, Artificial Sequence
  Synthetically generated peptide
  VARIANT (1)..(17): Xaa = Any Amino Acid
CCXELACNPACTXXGXA

SEQ ID NO: 7524 - protein, 16 aa, Artificial Sequence
  Synthetically generated peptide
  VARIANT (1)..(16): Xaa = Any Amino Acid
CCXELACNPACTXGXA

SEQ ID NO: 7525 - protein, 17 aa, Artificial Sequence
  Synthetically generated peptide
  VARIANT (1)..(17): Xaa = Any Amino Acid
CCXELACNPACTXGXXA

SEQ ID NO: 7526 - protein, 15 aa, Artificial Sequence
  Synthetically generated peptide
  VARIANT (1)..(15): Xaa = Any Amino Acid
CCXELACNPACTGXA

SEQ ID NO: 7527 - protein, 16 aa, Artificial Sequence
  Synthetically generated peptide
  VARIANT (1)..(16): Xaa = Any Amino Acid
CCXELACNPACTGXXA

SEQ ID NO: 7528 - protein, 17 aa, Artificial Sequence
  Synthetically generated peptide
  VARIANT (1)..(17): Xaa = Any Amino Acid
CCXELACNPACTGXXXA

SEQ ID NO: 7529 - protein, 14 aa, Artificial Sequence
  Synthetically generated peptide
  VARIANT (1)..(14): Xaa = Any Amino Acid
CCEXLACNPACTGA

SEQ ID NO: 7530 - protein, 15 aa, Artificial Sequence
  Synthetically generated peptide
  VARIANT (1)..(15): Xaa = Any Amino Acid
CCEXXLACNPACTGA

SEQ ID NO: 7531 - protein, 16 aa, Artificial Sequence
  Synthetically generated peptide
  VARIANT (1)..(16): Xaa = Any Amino Acid
CCEXXXLACNPACTGA

SEQ ID NO: 7532 - protein, 17 aa, Artificial Sequence
  Synthetically generated peptide
  VARIANT (1)..(17): Xaa = Any Amino Acid
CCEXXXXLACNPACTGA

SEQ ID NO: 7533 - protein, 17 aa, Artificial Sequence
  Synthetically generated peptide
  VARIANT (1)..(17): Xaa = Any Amino Acid
CCEXXXLXACNPACTGA

SEQ ID NO: 7534 - protein, 17 aa, Artificial Sequence
  Synthetically generated peptide
  VARIANT (1)..(17): Xaa = Any Amino Acid
CCEXXXLACXNPACTGA

SEQ ID NO: 7535 - protein, 17 aa, Artificial Sequence
  Synthetically generated peptide
  VARIANT (1)..(17): Xaa = Any Amino Acid
CCEXXXLACNXPACTGA

SEQ ID NO: 7536 - protein, 17 aa, Artificial Sequence
  Synthetically generated peptide
  VARIANT (1)..(17): Xaa = Any Amino Acid
CCEXXXLACNPXACTGA

SEQ ID NO: 7537 - protein, 17 aa, Artificial Sequence
  Synthetically generated peptide
  VARIANT (1)..(17): Xaa = Any Amino Acid
CCEXXXLACNPAXCTGA

SEQ ID NO: 7538 - protein, 17 aa, Artificial Sequence
  Synthetically generated peptide
  VARIANT (1)..(17): Xaa = Any Amino Acid
CCEXXXLACNPACXTGA

SEQ ID NO: 7539 - protein, 17 aa, Artificial Sequence
  Synthetically generated peptide
  VARIANT (1)..(17): Xaa = Any Amino Acid
CCEXXXLACNPACTXGA

SEQ ID NO: 7540 - protein, 17 aa, Artificial Sequence
  Synthetically generated peptide
  VARIANT (1)..(17): Xaa = Any Amino Acid
CCEXXXLACNPACTGXA

SEQ ID NO: 7541 - protein, 16 aa, Artificial Sequence
  Synthetically generated peptide
  VARIANT (1)..(16): Xaa = Any Amino Acid
CCEXXLXACNPACTGA

SEQ ID NO: 7542 - protein, 17 aa, Artificial Sequence
  Synthetically generated peptide
  VARIANT (1)..(17): Xaa = Any Amino Acid
CCEXXLXXACNPACTGA

SEQ ID NO: 7543 - protein, 17 aa, Artificial Sequence
  Synthetically generated peptide
  VARIANT (1)..(17): Xaa = Any Amino Acid
CCEXXLXACXNPACTGA

SEQ ID NO: 7544 - protein, 17 aa, Artificial Sequence
  Synthetically generated peptide
  VARIANT (1)..(17): Xaa = Any Amino Acid
CCEXXLXACNXPACTGA

SEQ ID NO: 7545 - protein, 17 aa, Artificial Sequence
  Synthetically generated peptide
  VARIANT (1)..(17): Xaa = Any Amino Acid
CCEXXLXACNPXACTGA

SEQ ID NO: 7546 - protein, 17 aa, Artificial Sequence
  Synthetically generated peptide
  VARIANT (1)..(17): Xaa = Any Amino Acid
CCEXXLXACNPAXCTGA

SEQ ID NO: 7547 - protein, 17 aa, Artificial Sequence
  Synthetically generated peptide
  VARIANT (1)..(17): Xaa = Any Amino Acid
CCEXXLXACNPACXTGA

SEQ ID NO: 7548 - protein, 17 aa, Artificial Sequence
  Synthetically generated peptide
  VARIANT (1)..(17): Xaa = Any Amino Acid
CCEXXLXACNPACTXGA

SEQ ID NO: 7549 - protein, 17 aa, Artificial Sequence
  Synthetically generated peptide
  VARIANT (1)..(17): Xaa = Any Amino Acid
CCEXXLXACNPACTGXA

SEQ ID NO: 7550 - protein, 16 aa, Artificial Sequence
  Synthetically generated peptide
  VARIANT (1)..(16): Xaa = Any Amino Acid
CCEXXLACXNPACTGA

SEQ ID NO: 7551 - protein, 17 aa, Artificial Sequence
  Synthetically generated peptide
  VARIANT (1)..(17): Xaa = Any Amino Acid
CCEXXLACXXNPACTGA

SEQ ID NO: 7552 - protein, 17 aa, Artificial Sequence
  Synthetically generated peptide
  VARIANT (1)..(17): Xaa = Any Amino Acid
CCEXXLACXNXPACTGA

SEQ ID NO: 7553 - protein, 17 aa, Artificial Sequence
  Synthetically generated peptide
  VARIANT (1)..(17): Xaa = Any Amino Acid
CCEXXLACXNPXACTGA

SEQ ID NO: 7554 - protein, 17 aa, Artificial Sequence
  Synthetically generated peptide
  VARIANT (1)..(17): Xaa = Any Amino Acid
CCEXXLACXNPAXCTGA

SEQ ID NO: 7555 - protein, 17 aa, Artificial Sequence
  Synthetically generated peptide
  VARIANT (1)..(17): Xaa = Any Amino Acid
CCEXXLACXNPACXTGA

SEQ ID NO: 7556 - protein, 17 aa, Artificial Sequence
  Synthetically generated peptide
  VARIANT (1)..(17): Xaa = Any Amino Acid
CCEXXLACXNPACTXGA

SEQ ID NO: 7557 - protein, 17 aa, Artificial Sequence
  Synthetically generated peptide
  VARIANT (1)..(17): Xaa = Any Amino Acid
CCEXXLACXNPACTGXA

SEQ ID NO: 7558 - protein, 16 aa, Artificial Sequence
  Synthetically generated peptide
  VARIANT (1)..(16): Xaa = Any Amino Acid
CCEXXLACNXPACTGA

SEQ ID NO: 7559 - protein, 17 aa, Artificial Sequence
  Synthetically generated peptide
  VARIANT (1)..(17): Xaa = Any Amino Acid
CCEXXLACNXXPACTGA

SEQ ID NO: 7560 - protein, 17 aa, Artificial Sequence
  Synthetically generated peptide
  VARIANT (1)..(17): Xaa = Any Amino Acid
CCEXXLACNXPXACTGA

SEQ ID NO: 7561 - protein, 17 aa, Artificial Sequence
  Synthetically generated peptide
  VARIANT (1)..(17): Xaa = Any Amino Acid
CCEXXLACNXPAXCTGA

SEQ ID NO: 7562 - protein, 17 aa, Artificial Sequence
  Synthetically generated peptide
  VARIANT (1)..(17): Xaa = Any Amino Acid
CCEXXLACNXPACXTGA

SEQ ID NO: 7563 - protein, 17 aa, Artificial Sequence
  Synthetically generated peptide
  VARIANT (1)..(17): Xaa = Any Amino Acid
CCEXXLACNXPACTXGA

SEQ ID NO: 7564 - protein, 17 aa, Artificial Sequence
  Synthetically generated peptide
  VARIANT (1)..(17): Xaa = Any Amino Acid
CCEXXLACNXPACTGXA

SEQ ID NO: 7565 - protein, 16 aa, Artificial Sequence
  Synthetically generated peptide
  VARIANT (1)..(16): Xaa = Any Amino Acid
CCEXXLACNPXACTGA

SEQ ID NO: 7566 - protein, 17 aa, Artificial Sequence
  Synthetically generated peptide
  VARIANT (1)..(17): Xaa = Any Amino Acid
CCEXXLACNPXXACTGA

SEQ ID NO: 7567 - protein, 17 aa, Artificial Sequence
  Synthetically generated peptide
  VARIANT (1)..(17): Xaa = Any Amino Acid
CCEXXLACNPXAXCTGA

SEQ ID NO: 7568 - protein, 17 aa, Artificial Sequence
  Synthetically generated peptide
  VARIANT (1)..(17): Xaa = Any Amino Acid
CCEXXLACNPXACXTGA

SEQ ID NO: 7569 - protein, 17 aa, Artificial Sequence
  Synthetically generated peptide
  VARIANT (1)..(17): Xaa = Any Amino Acid
CCEXXLACNPXACTXGA

SEQ ID NO: 7570 - protein, 17 aa, Artificial Sequence
  Synthetically generated peptide
  VARIANT (1)..(17): Xaa = Any Amino Acid
CCEXXLACNPXACTGXA

SEQ ID NO: 7571 - protein, 16 aa, Artificial Sequence
  Synthetically generated peptide
  VARIANT (1)..(16): Xaa = Any Amino Acid
CCEXXLACNPAXCTGA

SEQ ID NO: 7572 - protein, 17 aa, Artificial Sequence
  Synthetically generated peptide
  VARIANT (1)..(17): Xaa = Any Amino Acid
CCEXXLACNPAXXCTGA

SEQ ID NO: 7573 - protein, 17 aa, Artificial Sequence
  Synthetically generated peptide
  VARIANT (1)..(17): Xaa = Any Amino Acid
CCEXXLACNPAXCXTGA

SEQ ID NO: 7574 - protein, 17 aa, Artificial Sequence
  Synthetically generated peptide
  VARIANT (1)..(17): Xaa = Any Amino Acid
CCEXXLACNPAXCTXGA

SEQ ID NO: 7575 - protein, 17 aa, Artificial Sequence
  Synthetically generated peptide
  VARIANT (1)..(17): Xaa = Any Amino Acid
CCEXXLACNPAXCTGXA

SEQ ID NO: 7576 - protein, 16 aa, Artificial Sequence
  Synthetically generated peptide
  VARIANT (1)..(16): Xaa = Any Amino Acid
CCEXXLACNPACXTGA

SEQ ID NO: 7577 - protein, 17 aa, Artificial Sequence
  Synthetically generated peptide
  VARIANT (1)..(17): Xaa = Any Amino Acid
CCEXXLACNPACXXTGA

SEQ ID NO: 7578 - protein, 17 aa, Artificial Sequence
  Synthetically generated peptide
  VARIANT (1)..(17): Xaa = Any Amino Acid
CCEXXLACNPACXTXGA

SEQ ID NO: 7579 - protein, 17 aa, Artificial Sequence
  Synthetically generated peptide
  VARIANT (1)..(17): Xaa = Any Amino Acid
CCEXXLACNPACXTGXA

SEQ ID NO: 7580 - protein, 16 aa, Artificial Sequence
  Synthetically generated peptide
  VARIANT (1)..(16): Xaa = Any Amino Acid
CCEXXLACNPACTXGA

SEQ ID NO: 7581 - protein, 17 aa, Artificial Sequence
  Synthetically generated peptide
  VARIANT (1)..(17): Xaa = Any Amino Acid
CCEXXLACNPACTXXGA

SEQ ID NO: 7582 - protein, 17 aa, Artificial Sequence
  Synthetically generated peptide
  VARIANT (1)..(17): Xaa = Any Amino Acid
CCEXXLACNPACTXGXA

SEQ ID NO: 7583 - protein, 16 aa, Artificial Sequence
  Synthetically generated peptide
  VARIANT (1)..(16): Xaa = Any Amino Acid
CCEXXLACNPACTGXA

SEQ ID NO: 7584 - protein, 17 aa, Artificial Sequence
  Synthetically generated peptide
  VARIANT (1)..(17): Xaa = Any Amino Acid
CCEXXLACNPACTGXXA

SEQ ID NO: 7585 - protein, 15 aa, Artificial Sequence
  Synthetically generated peptide
  VARIANT (1)..(15): Xaa = Any Amino Acid
CCEXLXACNPACTGA

SEQ ID NO: 7586 - protein, 16 aa, Artificial Sequence
  Synthetically generated peptide
  VARIANT (1)..(16): Xaa = Any Amino Acid
CCEXLXXACNPACTGA

SEQ ID NO: 7587 - protein, 17 aa, Artificial Sequence
  Synthetically generated peptide
  VARIANT (1)..(17): Xaa = Any Amino Acid
CCEXLXXXACNPACTGA

SEQ ID NO: 7588 - protein, 17 aa, Artificial Sequence
  Synthetically generated peptide
  VARIANT (1)..(17): Xaa = Any Amino Acid
CCEXLXXACXNPACTGA

SEQ ID NO: 7589 - protein, 17 aa, Artificial Sequence
  Synthetically generated peptide
  VARIANT (1)..(17): Xaa = Any Amino Acid
CCEXLXXACNXPACTGA

SEQ ID NO: 7590 - protein, 17 aa, Artificial Sequence
  Synthetically generated peptide
  VARIANT (1)..(17): Xaa = Any Amino Acid
CCEXLXXACNPXACTGA

SEQ ID NO: 7591 - protein, 17 aa, Artificial Sequence
  Synthetically generated peptide
  VARIANT (1)..(17): Xaa = Any Amino Acid
CCEXLXXACNPAXCTGA

SEQ ID NO: 7592 - protein, 17 aa, Artificial Sequence
  Synthetically generated peptide
  VARIANT (1)..(17): Xaa = Any Amino Acid
CCEXLXXACNPACXTGA

SEQ ID NO: 7593 - protein, 17 aa, Artificial Sequence
  Synthetically generated peptide
  VARIANT (1)..(17): Xaa = Any Amino Acid
CCEXLXXACNPACTXGA

SEQ ID NO: 7594 - protein, 17 aa, Artificial Sequence
  Synthetically generated peptide
  VARIANT (1)..(17): Xaa = Any Amino Acid
CCEXLXXACNPACTGXA

SEQ ID NO: 7595 - protein, 16 aa, Artificial Sequence
  Synthetically generated peptide
  VARIANT (1)..(16): Xaa = Any Amino Acid
CCEXLXACXNPACTGA

SEQ ID NO: 7596 - protein, 17 aa, Artificial Sequence
  Synthetically generated peptide
  VARIANT (1)..(17): Xaa = Any Amino Acid
CCEXLXACXXNPACTGA

SEQ ID NO: 7597 - protein, 17 aa, Artificial Sequence
  Synthetically generated peptide
  VARIANT (1)..(17): Xaa = Any Amino Acid
CCEXLXACXNXPACTGA

SEQ ID NO: 7598 - protein, 17 aa, Artificial Sequence
  Synthetically generated peptide
  VARIANT (1)..(17): Xaa = Any Amino Acid
CCEXLXACXNPXACTGA

SEQ ID NO: 7599 - protein, 17 aa, Artificial Sequence
  Synthetically generated peptide
  VARIANT (1)..(17): Xaa = Any Amino Acid
CCEXLXACXNPAXCTGA

SEQ ID NO: 7600 - protein, 17 aa, Artificial Sequence
  Synthetically generated peptide
  VARIANT (1)..(17): Xaa = Any Amino Acid
CCEXLXACXNPACXTGA

SEQ ID NO: 7601 - protein, 17 aa, Artificial Sequence
  Synthetically generated peptide
  VARIANT (1)..(17): Xaa = Any Amino Acid
CCEXLXACXNPACTXGA

SEQ ID NO: 7602 - protein, 17 aa, Artificial Sequence
  Synthetically generated peptide
  VARIANT (1)..(17): Xaa = Any Amino Acid
CCEXLXACXNPACTGXA

SEQ ID NO: 7603 - protein, 16 aa, Artificial Sequence
  Synthetically generated peptide
  VARIANT (1)..(16): Xaa = Any Amino Acid
CCEXLXACNXPACTGA

SEQ ID NO: 7604 - protein, 17 aa, Artificial Sequence
  Synthetically generated peptide
  VARIANT (1)..(17): Xaa = Any Amino Acid
CCEXLXACNXXPACTGA

SEQ ID NO: 7605 - protein, 17 aa, Artificial Sequence
  Synthetically generated peptide
  VARIANT (1)..(17): Xaa = Any Amino Acid
CCEXLXACNXPXACTGA

SEQ ID NO: 7606 - protein, 17 aa, Artificial Sequence
  Synthetically generated peptide
  VARIANT (1)..(17): Xaa = Any Amino Acid
CCEXLXACNXPAXCTGA

SEQ ID NO: 7607 - protein, 17 aa, Artificial Sequence
  Synthetically generated peptide
  VARIANT (1)..(17): Xaa = Any Amino Acid
CCEXLXACNXPACXTGA

SEQ ID NO: 7608 - protein, 17 aa, Artificial Sequence
  Synthetically generated peptide
  VARIANT (1)..(17): Xaa = Any Amino Acid
CCEXLXACNXPACTXGA

SEQ ID NO: 7609 - protein, 17 aa, Artificial Sequence
  Synthetically generated peptide
  VARIANT (1)..(17): Xaa = Any Amino Acid
CCEXLXACNXPACTGXA

SEQ ID NO: 7610 - protein, 16 aa, Artificial Sequence
  Synthetically generated peptide
  VARIANT (1)..(16): Xaa = Any Amino Acid
CCEXLXACNPXACTGA

SEQ ID NO: 7611 - protein, 17 aa, Artificial Sequence
  Synthetically generated peptide
  VARIANT (1)..(17): Xaa = Any Amino Acid
CCEXLXACNPXXACTGA

SEQ ID NO: 7612 - protein, 17 aa, Artificial Sequence
  Synthetically generated peptide
  VARIANT (1)..(17): Xaa = Any Amino Acid
CCEXLXACNPXAXCTGA

SEQ ID NO: 7613 - protein, 17 aa, Artificial Sequence
  Synthetically generated peptide
  VARIANT (1)..(17): Xaa = Any Amino Acid
CCEXLXACNPXACXTGA

SEQ ID NO: 7614 - protein, 17 aa, Artificial Sequence
  Synthetically generated peptide
  VARIANT (1)..(17): Xaa = Any Amino Acid
CCEXLXACNPXACTXGA

SEQ ID NO: 7615 - protein, 17 aa, Artificial Sequence
  Synthetically generated peptide
  VARIANT (1)..(17): Xaa = Any Amino Acid
CCEXLXACNPXACTGXA

SEQ ID NO: 7616 - protein, 16 aa, Artificial Sequence
  Synthetically generated peptide
  VARIANT (1)..(16): Xaa = Any Amino Acid
CCEXLXACNPAXCTGA

SEQ ID NO: 7617 - protein, 17 aa, Artificial Sequence
  Synthetically generated peptide
  VARIANT (1)..(17): Xaa = Any Amino Acid
CCEXLXACNPAXXCTGA

SEQ ID NO: 7618 - protein, 17 aa, Artificial Sequence
  Synthetically generated peptide
  VARIANT (1)..(17): Xaa = Any Amino Acid
CCEXLXACNPAXCXTGA

SEQ ID NO: 7619 - protein, 17 aa, Artificial Sequence
  Synthetically generated peptide
  VARIANT (1)..(17): Xaa = Any Amino Acid
CCEXLXACNPAXCTXGA

SEQ ID NO: 7620 - protein, 17 aa, Artificial Sequence
  Synthetically generated peptide
  VARIANT (1)..(17): Xaa = Any Amino Acid
CCEXLXACNPAXCTGXA

SEQ ID NO: 7621 - protein, 16 aa, Artificial Sequence
  Synthetically generated peptide
  VARIANT (1)..(16): Xaa = Any Amino Acid
CCEXLXACNPACXTGA

SEQ ID NO: 7622 - protein, 17 aa, Artificial Sequence
  Synthetically generated peptide
  VARIANT (1)..(17): Xaa = Any Amino Acid
CCEXLXACNPACXXTGA

SEQ ID NO: 7623 - protein, 17 aa, Artificial Sequence
  Synthetically generated peptide
  VARIANT (1)..(17): Xaa = Any Amino Acid
CCEXLXACNPACXTXGA

SEQ ID NO: 7624 - protein, 17 aa, Artificial Sequence
  Synthetically generated peptide
  VARIANT (1)..(17): Xaa = Any Amino Acid
CCEXLXACNPACXTGXA

SEQ ID NO: 7625 - protein, 16 aa, Artificial Sequence
  Synthetically generated peptide
  VARIANT (1)..(16): Xaa = Any Amino Acid
CCEXLXACNPACTXGA

SEQ ID NO: 7626 - protein, 17 aa, Artificial Sequence
  Synthetically generated peptide
  VARIANT (1)..(17): Xaa = Any Amino Acid
CCEXLXACNPACTXXGA

SEQ ID NO: 7627 - protein, 17 aa, Artificial Sequence
  Synthetically generated peptide
  VARIANT (1)..(17): Xaa = Any Amino Acid
CCEXLXACNPACTXGXA

SEQ ID NO: 7628 - protein, 16 aa, Artificial Sequence
  Synthetically generated peptide
  VARIANT (1)..(16): Xaa = Any Amino Acid
CCEXLXACNPACTGXA

SEQ ID NO: 7629 - protein, 17 aa, Artificial Sequence
  Synthetically generated peptide
  VARIANT (1)..(17): Xaa = Any Amino Acid
CCEXLXACNPACTGXXA

SEQ ID NO: 7630 - protein, 15 aa, Artificial Sequence
  Synthetically generated peptide
  VARIANT (1)..(15): Xaa = Any Amino Acid
CCEXLACXNPACTGA

SEQ ID NO: 7631 - protein, 16 aa, Artificial Sequence
  Synthetically generated peptide
  VARIANT (1)..(16): Xaa = Any Amino Acid
CCEXLACXXNPACTGA

SEQ ID NO: 7632 - protein, 17 aa, Artificial Sequence
  Synthetically generated peptide
  VARIANT (1)..(17): Xaa = Any Amino Acid
CCEXLACXXXNPACTGA

SEQ ID NO: 7633 - protein, 17 aa, Artificial Sequence
  Synthetically generated peptide
  VARIANT (1)..(17): Xaa = Any Amino Acid
CCEXLACXXNXPACTGA

SEQ ID NO: 7634 - protein, 17 aa, Artificial Sequence
  Synthetically generated peptide
  VARIANT (1)..(17): Xaa = Any Amino Acid
CCEXLACXXNPXACTGA

SEQ ID NO: 7635 - protein, 17 aa, Artificial Sequence
  Synthetically generated peptide
  VARIANT (1)..(17): Xaa = Any Amino Acid
CCEXLACXXNPAXCTGA

SEQ ID NO: 7636 - protein, 17 aa, Artificial Sequence
  Synthetically generated peptide
  VARIANT (1)..(17): Xaa = Any Amino Acid
CCEXLACXXNPACXTGA

SEQ ID NO: 7637 - protein, 17 aa, Artificial Sequence
  Synthetically generated peptide
  VARIANT (1)..(17): Xaa = Any Amino Acid
CCEXLACXXNPACTXGA

SEQ ID NO: 7638 - protein, 17 aa, Artificial Sequence
  Synthetically generated peptide
  VARIANT (1)..(17): Xaa = Any Amino Acid
CCEXLACXXNPACTGXA

SEQ ID NO: 7639 - protein, 16 aa, Artificial Sequence
  Synthetically generated peptide
  VARIANT (1)..(16): Xaa = Any Amino Acid
CCEXLACXNXPACTGA

SEQ ID NO: 7640 - protein, 17 aa, Artificial Sequence
  Synthetically generated peptide
  VARIANT (1)..(17): Xaa = Any Amino Acid
CCEXLACXNXXPACTGA

SEQ ID NO: 7641 - protein, 17 aa, Artificial Sequence
  Synthetically generated peptide
  VARIANT (1)..(17): Xaa = Any Amino Acid
CCEXLACXNXPXACTGA

SEQ ID NO: 7642 - protein, 17 aa, Artificial Sequence
  Synthetically generated peptide
  VARIANT (1)..(17): Xaa = Any Amino Acid
CCEXLACXNXPAXCTGA

SEQ ID NO: 7643 - protein, 17 aa, Artificial Sequence
  Synthetically generated peptide
  VARIANT (1)..(17): Xaa = Any Amino Acid
CCEXLACXNXPACXTGA

SEQ ID NO: 7644 - protein, 17 aa, Artificial Sequence
  Synthetically generated peptide
  VARIANT (1)..(17): Xaa = Any Amino Acid
CCEXLACXNXPACTXGA

SEQ ID NO: 7645 - protein, 17 aa, Artificial Sequence
  Synthetically generated peptide
  VARIANT (1)..(17): Xaa = Any Amino Acid
CCEXLACXNXPACTGXA

SEQ ID NO: 7646 - protein, 16 aa, Artificial Sequence
  Synthetically generated peptide
  VARIANT (1)..(16): Xaa = Any Amino Acid
CCEXLACXNPXACTGA

SEQ ID NO: 7647 - protein, 17 aa, Artificial Sequence
  Synthetically generated peptide
  VARIANT (1)..(17): Xaa = Any Amino Acid
CCEXLACXNPXXACTGA

SEQ ID NO: 7648 - protein, 17 aa, Artificial Sequence
  Synthetically generated peptide
  VARIANT (1)..(17): Xaa = Any Amino Acid
CCEXLACXNPXAXCTGA

SEQ ID NO: 7649 - protein, 17 aa, Artificial Sequence
  Synthetically generated peptide
  VARIANT (1)..(17): Xaa = Any Amino Acid
CCEXLACXNPXACXTGA

SEQ ID NO: 7650 - protein, 17 aa, Artificial Sequence
  Synthetically generated peptide
  VARIANT (1)..(17): Xaa = Any Amino Acid
CCEXLACXNPXACTXGA

SEQ ID NO: 7651 - protein, 17 aa, Artificial Sequence
  Synthetically generated peptide
  VARIANT (1)..(17): Xaa = Any Amino Acid
CCEXLACXNPXACTGXA

SEQ ID NO: 7652 - protein, 16 aa, Artificial Sequence
  Synthetically generated peptide
  VARIANT (1)..(16): Xaa = Any Amino Acid
CCEXLACXNPAXCTGA

SEQ ID NO: 7653 - protein, 17 aa, Artificial Sequence
  Synthetically generated peptide
  VARIANT (1)..(17): Xaa = Any Amino Acid
CCEXLACXNPAXXCTGA

SEQ ID NO: 7654 - protein, 17 aa, Artificial Sequence
  Synthetically generated peptide
  VARIANT (1)..(17): Xaa = Any Amino Acid
CCEXLACXNPAXCXTGA

SEQ ID NO: 7655 - protein, 17 aa, Artificial Sequence
  Synthetically generated peptide
  VARIANT (1)..(17): Xaa = Any Amino Acid
CCEXLACXNPAXCTXGA

SEQ ID NO: 7656 - protein, 17 aa, Artificial Sequence
  Synthetically generated peptide
  VARIANT (1)..(17): Xaa = Any Amino Acid
CCEXLACXNPAXCTGXA

SEQ ID NO: 7657 - protein, 16 aa, Artificial Sequence
  Synthetically generated peptide
  VARIANT (1)..(16): Xaa = Any Amino Acid
CCEXLACXNPACXTGA

SEQ ID NO: 7658 - protein, 17 aa, Artificial Sequence
  Synthetically generated peptide
  VARIANT (1)..(17): Xaa = Any Amino Acid
CCEXLACXNPACXXTGA

SEQ ID NO: 7659 - protein, 17 aa, Artificial Sequence
  Synthetically generated peptide
  VARIANT (1)..(17): Xaa = Any Amino Acid
CCEXLACXNPACXTXGA

SEQ ID NO: 7660 - protein, 17 aa, Artificial Sequence
  Synthetically generated peptide
  VARIANT (1)..(17): Xaa = Any Amino Acid
CCEXLACXNPACXTGXA

SEQ ID NO: 7661 - protein, 16 aa, Artificial Sequence
  Synthetically generated peptide
  VARIANT (1)..(16): Xaa = Any Amino Acid
CCEXLACXNPACTXGA

SEQ ID NO: 7662 - protein, 17 aa, Artificial Sequence
  Synthetically generated peptide
  VARIANT (1)..(17): Xaa = Any Amino Acid
CCEXLACXNPACTXXGA

SEQ ID NO: 7663 - protein, 17 aa, Artificial Sequence
  Synthetically generated peptide
  VARIANT (1)..(17): Xaa = Any Amino Acid
CCEXLACXNPACTXGXA

SEQ ID NO: 7664 - protein, 16 aa, Artificial Sequence
  Synthetically generated peptide
  VARIANT (1)..(16): Xaa = Any Amino Acid
CCEXLACXNPACTGXA

SEQ ID NO: 7665 - protein, 17 aa, Artificial Sequence
  Synthetically generated peptide
  VARIANT (1)..(17): Xaa = Any Amino Acid
CCEXLACXNPACTGXXA

SEQ ID NO: 7666 - protein, 15 aa, Artificial Sequence
  Synthetically generated peptide
  VARIANT (1)..(15): Xaa = Any Amino Acid
CCEXLACNXPACTGA

SEQ ID NO: 7667 - protein, 16 aa, Artificial Sequence
  Synthetically generated peptide
  VARIANT (1)..(16): Xaa = Any Amino Acid
CCEXLACNXXPACTGA

SEQ ID NO: 7668 - protein, 17 aa, Artificial Sequence
  Synthetically generated peptide
  VARIANT (1)..(17): Xaa = Any Amino Acid
CCEXLACNXXXPACTGA

SEQ ID NO: 7669 - protein, 17 aa, Artificial Sequence
  Synthetically generated peptide
  VARIANT (1)..(17): Xaa = Any Amino Acid
CCEXLACNXXPXACTGA

SEQ ID NO: 7670 - protein, 17 aa, Artificial Sequence
  Synthetically generated peptide
  VARIANT (1)..(17): Xaa = Any Amino Acid
CCEXLACNXXPAXCTGA

SEQ ID NO: 7671 - protein, 17 aa, Artificial Sequence
  Synthetically generated peptide
  VARIANT (1)..(17): Xaa = Any Amino Acid
CCEXLACNXXPACXTGA

SEQ ID NO: 7672 - protein, 17 aa, Artificial Sequence
  Synthetically generated peptide
  VARIANT (1)..(17): Xaa = Any Amino Acid
CCEXLACNXXPACTXGA

SEQ ID NO: 7673 - protein, 17 aa, Artificial Sequence
  Synthetically generated peptide
  VARIANT (1)..(17): Xaa = Any Amino Acid
CCEXLACNXXPACTGXA

SEQ ID NO: 7674 - protein, 16 aa, Artificial Sequence
  Synthetically generated peptide
  VARIANT (1)..(16): Xaa = Any Amino Acid
CCEXLACNXPXACTGA

SEQ ID NO: 7675 - protein, 17 aa, Artificial Sequence
  Synthetically generated peptide
  VARIANT (1)..(17): Xaa = Any Amino Acid
CCEXLACNXPXXACTGA

SEQ ID NO: 7676 - protein, 17 aa, Artificial Sequence
  Synthetically generated peptide
  VARIANT (1)..(17): Xaa = Any Amino Acid
CCEXLACNXPXAXCTGA

SEQ ID NO: 7677 - protein, 17 aa, Artificial Sequence
  Synthetically generated peptide
  VARIANT (1)..(17): Xaa = Any Amino Acid
CCEXLACNXPXACXTGA

SEQ ID NO: 7678 - protein, 17 aa, Artificial Sequence
  Synthetically generated peptide
  VARIANT (1)..(17): Xaa = Any Amino Acid
CCEXLACNXPXACTXGA

SEQ ID NO: 7679 - protein, 17 aa, Artificial Sequence
  Synthetically generated peptide
  VARIANT (1)..(17): Xaa = Any Amino Acid
CCEXLACNXPXACTGXA

SEQ ID NO: 7680 - protein, 16 aa, Artificial Sequence
  Synthetically generated peptide
  VARIANT (1)..(16): Xaa = Any Amino Acid
CCEXLACNXPAXCTGA

SEQ ID NO: 7681 - protein, 17 aa, Artificial Sequence
  Synthetically generated peptide
  VARIANT (1)..(17): Xaa = Any Amino Acid
CCEXLACNXPAXXCTGA

SEQ ID NO: 7682 - protein, 17 aa, Artificial Sequence
  Synthetically generated peptide
  VARIANT (1)..(17): Xaa = Any Amino Acid
CCEXLACNXPAXCXTGA

SEQ ID NO: 7683 - protein, 17 aa, Artificial Sequence
  Synthetically generated peptide
  VARIANT (1)..(17): Xaa = Any Amino Acid
CCEXLACNXPAXCTXGA

SEQ ID NO: 7684 - protein, 17 aa, Artificial Sequence
  Synthetically generated peptide
  VARIANT (1)..(17): Xaa = Any Amino Acid
CCEXLACNXPAXCTGXA

SEQ ID NO: 7685 - protein, 16 aa, Artificial Sequence
  Synthetically generated peptide
  VARIANT (1)..(16): Xaa = Any Amino Acid
CCEXLACNXPACXTGA

SEQ ID NO: 7686 - protein, 17 aa, Artificial Sequence
  Synthetically generated peptide
  VARIANT (1)..(17): Xaa = Any Amino Acid
CCEXLACNXPACXXTGA

SEQ ID NO: 7687 - protein, 17 aa, Artificial Sequence
  Synthetically generated peptide
  VARIANT (1)..(17): Xaa = Any Amino Acid
CCEXLACNXPACXTXGA

SEQ ID NO: 7688 - protein, 17 aa, Artificial Sequence
  Synthetically generated peptide
  VARIANT (1)..(17): Xaa = Any Amino Acid
CCEXLACNXPACXTGXA

SEQ ID NO: 7689 - protein, 16 aa, Artificial Sequence
  Synthetically generated peptide
  VARIANT (1)..(16): Xaa = Any Amino Acid
CCEXLACNXPACTXGA

SEQ ID NO: 7690 - protein, 17 aa, Artificial Sequence
  Synthetically generated peptide
  VARIANT (1)..(17): Xaa = Any Amino Acid
CCEXLACNXPACTXXGA

SEQ ID NO: 7691 - protein, 17 aa, Artificial Sequence
  Synthetically generated peptide
  VARIANT (1)..(17): Xaa = Any Amino Acid
CCEXLACNXPACTXGXA

SEQ ID NO: 7692 - protein, 16 aa, Artificial Sequence
  Synthetically generated peptide
  VARIANT (1)..(16): Xaa = Any Amino Acid
CCEXLACNXPACTGXA

SEQ ID NO: 7693 - protein, 17 aa, Artificial Sequence
  Synthetically generated peptide
  VARIANT (1)..(17): Xaa = Any Amino Acid
CCEXLACNXPACTGXXA

SEQ ID NO: 7694 - protein, 15 aa, Artificial Sequence
  Synthetically generated peptide
  VARIANT (1)..(15): Xaa = Any Amino Acid
CCEXLACNPXACTGA

SEQ ID NO: 7695 - protein, 16 aa, Artificial Sequence
  Synthetically generated peptide
  VARIANT (1)..(16): Xaa = Any Amino Acid
CCEXLACNPXXACTGA

SEQ ID NO: 7696 - protein, 17 aa, Artificial Sequence
  Synthetically generated peptide
  VARIANT (1)..(17): Xaa = Any Amino Acid
CCEXLACNPXXXACTGA

SEQ ID NO: 7697 - protein, 17 aa, Artificial Sequence
  Synthetically generated peptide
  VARIANT (1)..(17): Xaa = Any Amino Acid
CCEXLACNPXXAXCTGA

SEQ ID NO: 7698 - protein, 17 aa, Artificial Sequence
  Synthetically generated peptide
  VARIANT (1)..(17): Xaa = Any Amino Acid
CCEXLACNPXXACXTGA

SEQ ID NO: 7699 - protein, 17 aa, Artificial Sequence
  Synthetically generated peptide
  VARIANT (1)..(17): Xaa = Any Amino Acid
CCEXLACNPXXACTXGA

SEQ ID NO: 7700 - protein, 17 aa, Artificial Sequence
  Synthetically generated peptide
  VARIANT (1)..(17): Xaa = Any Amino Acid
CCEXLACNPXXACTGXA

SEQ ID NO: 7701 - protein, 16 aa, Artificial Sequence
  Synthetically generated peptide
  VARIANT (1)..(16): Xaa = Any Amino Acid
CCEXLACNPXAXCTGA

SEQ ID NO: 7702 - protein, 17 aa, Artificial Sequence
  Synthetically generated peptide
  VARIANT (1)..(17): Xaa = Any Amino Acid
CCEXLACNPXAXXCTGA

SEQ ID NO: 7703 - protein, 17 aa, Artificial Sequence
  Synthetically generated peptide
  VARIANT (1)..(17): Xaa = Any Amino Acid
CCEXLACNPXAXCXTGA

SEQ ID NO: 7704 - protein, 17 aa, Artificial Sequence
  Synthetically generated peptide
  VARIANT (1)..(17): Xaa = Any Amino Acid
CCEXLACNPXAXCTXGA

SEQ ID NO: 7705 - protein, 17 aa, Artificial Sequence
  Synthetically generated peptide
  VARIANT (1)..(17): Xaa = Any Amino Acid
CCEXLACNPXAXCTGXA

SEQ ID NO: 7706 - protein, 16 aa, Artificial Sequence
  Synthetically generated peptide
  VARIANT (1)..(16): Xaa = Any Amino Acid
CCEXLACNPXACXTGA

SEQ ID NO: 7707 - protein, 17 aa, Artificial Sequence
  Synthetically generated peptide
  VARIANT (1)..(17): Xaa = Any Amino Acid
CCEXLACNPXACXXTGA

SEQ ID NO: 7708 - protein, 17 aa, Artificial Sequence
  Synthetically generated peptide
  VARIANT (1)..(17): Xaa = Any Amino Acid
CCEXLACNPXACXTXGA

SEQ ID NO: 7709 - protein, 17 aa, Artificial Sequence
  Synthetically generated peptide
  VARIANT (1)..(17): Xaa = Any Amino Acid
CCEXLACNPXACXTGXA

SEQ ID NO: 7710 - protein, 16 aa, Artificial Sequence
  Synthetically generated peptide
  VARIANT (1)..(16): Xaa = Any Amino Acid
CCEXLACNPXACTXGA

SEQ ID NO: 7711 - protein, 17 aa, Artificial Sequence
  Synthetically generated peptide
  VARIANT (1)..(17): Xaa = Any Amino Acid
CCEXLACNPXACTXXGA

SEQ ID NO: 7712 - protein, 17 aa, Artificial Sequence
  Synthetically generated peptide
  VARIANT (1)..(17): Xaa = Any Amino Acid
CCEXLACNPXACTXGXA

SEQ ID NO: 7713 - protein, 16 aa, Artificial Sequence
  Synthetically generated peptide
  VARIANT (1)..(16): Xaa = Any Amino Acid
CCEXLACNPXACTGXA

SEQ ID NO: 7714 - protein, 17 aa, Artificial Sequence
  Synthetically generated peptide
  VARIANT (1)..(17): Xaa = Any Amino Acid
CCEXLACNPXACTGXXA

SEQ ID NO: 7715 - protein, 15 aa, Artificial Sequence
  Synthetically generated peptide
  VARIANT (1)..(15): Xaa = Any Amino Acid
CCEXLACNPAXCTGA

SEQ ID NO: 7716 - protein, 16 aa, Artificial Sequence
  Synthetically generated peptide
  VARIANT (1)..(16): Xaa = Any Amino Acid
CCEXLACNPAXXCTGA

SEQ ID NO: 7717 - protein, 17 aa, Artificial Sequence
  Synthetically generated peptide
  VARIANT (1)..(17): Xaa = Any Amino Acid
CCEXLACNPAXXXCTGA

SEQ ID NO: 7718 - protein, 17 aa, Artificial Sequence
  Synthetically generated peptide
  VARIANT (1)..(17): Xaa = Any Amino Acid
CCEXLACNPAXXCXTGA

SEQ ID NO: 7719 - protein, 17 aa, Artificial Sequence
  Synthetically generated peptide
  VARIANT (1)..(17): Xaa = Any Amino Acid
CCEXLACNPAXXCTXGA

SEQ ID NO: 7720 - protein, 17 aa, Artificial Sequence
  Synthetically generated peptide
  VARIANT (1)..(17): Xaa = Any Amino Acid
CCEXLACNPAXXCTGXA

SEQ ID NO: 7721 - protein, 16 aa, Artificial Sequence
  Synthetically generated peptide
  VARIANT (1)..(16): Xaa = Any Amino Acid
CCEXLACNPAXCXTGA

SEQ ID NO: 7722 - protein, 17 aa, Artificial Sequence
  Synthetically generated peptide
  VARIANT (1)..(17): Xaa = Any Amino Acid
CCEXLACNPAXCXXTGA

SEQ ID NO: 7723 - protein, 17 aa, Artificial Sequence
  Synthetically generated peptide
  VARIANT (1)..(17): Xaa = Any Amino Acid
CCEXLACNPAXCXTXGA

SEQ ID NO: 7724 - protein, 17 aa, Artificial Sequence
  Synthetically generated peptide
  VARIANT (1)..(17): Xaa = Any Amino Acid
CCEXLACNPAXCXTGXA

SEQ ID NO: 7725 - protein, 16 aa, Artificial Sequence
  Synthetically generated peptide
  VARIANT (1)..(16): Xaa = Any Amino Acid
CCEXLACNPAXCTXGA

SEQ ID NO: 7726 - protein, 17 aa, Artificial Sequence
  Synthetically generated peptide
  VARIANT (1)..(17): Xaa = Any Amino Acid
CCEXLACNPAXCTXXGA

SEQ ID NO: 7727 - protein, 17 aa, Artificial Sequence
  Synthetically generated peptide
  VARIANT (1)..(17): Xaa = Any Amino Acid
CCEXLACNPAXCTXGXA

SEQ ID NO: 7728 - protein, 16 aa, Artificial Sequence
  Synthetically generated peptide
  VARIANT (1)..(16): Xaa = Any Amino Acid
CCEXLACNPAXCTGXA

SEQ ID NO: 7729 - protein, 17 aa, Artificial Sequence
  Synthetically generated peptide
  VARIANT (1)..(17): Xaa = Any Amino Acid
CCEXLACNPAXCTGXXA

SEQ ID NO: 7730 - protein, 15 aa, Artificial Sequence
  Synthetically generated peptide
  VARIANT (1)..(15): Xaa = Any Amino Acid
CCEXLACNPACXTGA

SEQ ID NO: 7731 - protein, 16 aa, Artificial Sequence
  Synthetically generated peptide
  VARIANT (1)..(16): Xaa = Any Amino Acid
CCEXLACNPACXXTGA

SEQ ID NO: 7732 - protein, 17 aa, Artificial Sequence
  Synthetically generated peptide
  VARIANT (1)..(17): Xaa = Any Amino Acid
CCEXLACNPACXXXTGA

SEQ ID NO: 7733 - protein, 17 aa, Artificial Sequence
  Synthetically generated peptide
  VARIANT (1)..(17): Xaa = Any Amino Acid
CCEXLACNPACXXTXGA

SEQ ID NO: 7734 - protein, 17 aa, Artificial Sequence
  Synthetically generated peptide
  VARIANT (1)..(17): Xaa = Any Amino Acid
CCEXLACNPACXXTGXA

SEQ ID NO: 7735 - protein, 16 aa, Artificial Sequence
  Synthetically generated peptide
  VARIANT (1)..(16): Xaa = Any Amino Acid
CCEXLACNPACXTXGA

SEQ ID NO: 7736 - protein, 17 aa, Artificial Sequence
  Synthetically generated peptide
  VARIANT (1)..(17): Xaa = Any Amino Acid
CCEXLACNPACXTXXGA

SEQ ID NO: 7737 - protein, 17 aa, Artificial Sequence
  Synthetically generated peptide
  VARIANT (1)..(17): Xaa = Any Amino Acid
CCEXLACNPACXTXGXA

SEQ ID NO: 7738 - protein, 16 aa, Artificial Sequence
  Synthetically generated peptide
  VARIANT (1)..(16): Xaa = Any Amino Acid
CCEXLACNPACXTGXA

SEQ ID NO: 7739 - protein, 17 aa, Artificial Sequence
  Synthetically generated peptide
  VARIANT (1)..(17): Xaa = Any Amino Acid
CCEXLACNPACXTGXXA

SEQ ID NO: 7740 - protein, 15 aa, Artificial Sequence
  Synthetically generated peptide
  VARIANT (1)..(15): Xaa = Any Amino Acid
CCEXLACNPACTXGA

SEQ ID NO: 7741 - protein, 16 aa, Artificial Sequence
  Synthetically generated peptide
  VARIANT (1)..(16): Xaa = Any Amino Acid
CCEXLACNPACTXXGA

SEQ ID NO: 7742 - protein, 17 aa, Artificial Sequence
  Synthetically generated peptide
  VARIANT (1)..(17): Xaa = Any Amino Acid
CCEXLACNPACTXXXGA

SEQ ID NO: 7743 - protein, 17 aa, Artificial Sequence
  Synthetically generated peptide
  VARIANT (1)..(17): Xaa = Any Amino Acid
CCEXLACNPACTXXGXA

SEQ ID NO: 7744 - protein, 16 aa, Artificial Sequence
  Synthetically generated peptide
  VARIANT (1)..(16): Xaa = Any Amino Acid
CCEXLACNPACTXGXA

SEQ ID NO: 7745 - protein, 17 aa, Artificial Sequence
  Synthetically generated peptide
  VARIANT (1)..(17): Xaa = Any Amino Acid
CCEXLACNPACTXGXXA

SEQ ID NO: 7746 - protein, 15 aa, Artificial Sequence
  Synthetically generated peptide
  VARIANT (1)..(15): Xaa = Any Amino Acid
CCEXLACNPACTGXA

SEQ ID NO: 7747 - protein, 16 aa, Artificial Sequence
  Synthetically generated peptide
  VARIANT (1)..(16): Xaa = Any Amino Acid
CCEXLACNPACTGXXA

SEQ ID NO: 7748 - protein, 17 aa, Artificial Sequence
  Synthetically generated peptide
  VARIANT (1)..(17): Xaa = Any Amino Acid
CCEXLACNPACTGXXXA

SEQ ID NO: 7749 - protein, 14 aa, Artificial Sequence
  Synthetically generated peptide
  VARIANT (1)..(14): Xaa = Any Amino Acid
CCELXACNPACTGA

SEQ ID NO: 7750 - protein, 15 aa, Artificial Sequence
  Synthetically generated peptide
  VARIANT (1)..(15): Xaa = Any Amino Acid
CCELXXACNPACTGA

SEQ ID NO: 7751 - protein, 16 aa, Artificial Sequence
  Synthetically generated peptide
  VARIANT (1)..(16): Xaa = Any Amino Acid
CCELXXXACNPACTGA

SEQ ID NO: 7752 - protein, 17 aa, Artificial Sequence
  Synthetically generated peptide
  VARIANT (1)..(17): Xaa = Any Amino Acid
CCELXXXXACNPACTGA

SEQ ID NO: 7753 - protein, 17 aa, Artificial Sequence
  Synthetically generated peptide
  VARIANT (1)..(17): Xaa = Any Amino Acid
CCELXXXACXNPACTGA

SEQ ID NO: 7754 - protein, 17 aa, Artificial Sequence
  Synthetically generated peptide
  VARIANT (1)..(17): Xaa = Any Amino Acid
CCELXXXACNXPACTGA

SEQ ID NO: 7755 - protein, 17 aa, Artificial Sequence
  Synthetically generated peptide
  VARIANT (1)..(17): Xaa = Any Amino Acid
CCELXXXACNPXACTGA

SEQ ID NO: 7756 - protein, 17 aa, Artificial Sequence
  Synthetically generated peptide
  VARIANT (1)..(17): Xaa = Any Amino Acid
CCELXXXACNPAXCTGA

SEQ ID NO: 7757 - protein, 17 aa, Artificial Sequence
  Synthetically generated peptide
  VARIANT (1)..(17): Xaa = Any Amino Acid
CCELXXXACNPACXTGA

SEQ ID NO: 7758 - protein, 17 aa, Artificial Sequence
  Synthetically generated peptide
  VARIANT (1)..(17): Xaa = Any Amino Acid
CCELXXXACNPACTXGA

SEQ ID NO: 7759 - protein, 17 aa, Artificial Sequence
  Synthetically generated peptide
  VARIANT (1)..(17): Xaa = Any Amino Acid
CCELXXXACNPACTGXA

SEQ ID NO: 7760 - protein, 16 aa, Artificial Sequence
  Synthetically generated peptide
  VARIANT (1)..(16): Xaa = Any Amino Acid
CCELXXACXNPACTGA

SEQ ID NO: 7761 - protein, 17 aa, Artificial Sequence
  Synthetically generated peptide
  VARIANT (1)..(17): Xaa = Any Amino Acid
CCELXXACXXNPACTGA

SEQ ID NO: 7762 - protein, 17 aa, Artificial Sequence
  Synthetically generated peptide
  VARIANT (1)..(17): Xaa = Any Amino Acid
CCELXXACXNXPACTGA

SEQ ID NO: 7763 - protein, 17 aa, Artificial Sequence
  Synthetically generated peptide
  VARIANT (1)..(17): Xaa = Any Amino Acid
CCELXXACXNPXACTGA

SEQ ID NO: 7764 - protein, 17 aa, Artificial Sequence
  Synthetically generated peptide
  VARIANT (1)..(17): Xaa = Any Amino Acid
CCELXXACXNPAXCTGA

SEQ ID NO: 7765 - protein, 17 aa, Artificial Sequence
  Synthetically generated peptide
  VARIANT (1)..(17): Xaa = Any Amino Acid
CCELXXACXNPACXTGA

SEQ ID NO: 7766 - protein, 17 aa, Artificial Sequence
  Synthetically generated peptide
  VARIANT (1)..(17): Xaa = Any Amino Acid
CCELXXACXNPACTXGA

SEQ ID NO: 7767 - protein, 17 aa, Artificial Sequence
  Synthetically generated peptide
  VARIANT (1)..(17): Xaa = Any Amino Acid
CCELXXACXNPACTGXA

SEQ ID NO: 7768 - protein, 16 aa, Artificial Sequence
  Synthetically generated peptide
  VARIANT (1)..(16): Xaa = Any Amino Acid
CCELXXACNXPACTGA

SEQ ID NO: 7769 - protein, 17 aa, Artificial Sequence
  Synthetically generated peptide
  VARIANT (1)..(17): Xaa = Any Amino Acid
CCELXXACNXXPACTGA

SEQ ID NO: 7770 - protein, 17 aa, Artificial Sequence
  Synthetically generated peptide
  VARIANT (1)..(17): Xaa = Any Amino Acid
CCELXXACNXPXACTGA

SEQ ID NO: 7771 - protein, 17 aa, Artificial Sequence
  Synthetically generated peptide
  VARIANT (1)..(17): Xaa = Any Amino Acid
CCELXXACNXPAXCTGA

SEQ ID NO: 7772 - protein, 17 aa, Artificial Sequence
  Synthetically generated peptide
  VARIANT (1)..(17): Xaa = Any Amino Acid
CCELXXACNXPACXTGA

SEQ ID NO: 7773 - protein, 17 aa, Artificial Sequence
  Synthetically generated peptide
  VARIANT (1)..(17): Xaa = Any Amino Acid
CCELXXACNXPACTXGA

SEQ ID NO: 7774 - protein, 17 aa, Artificial Sequence
  Synthetically generated peptide
  VARIANT (1)..(17): Xaa = Any Amino Acid
CCELXXACNXPACTGXA

SEQ ID NO: 7775 - protein, 16 aa, Artificial Sequence
  Synthetically generated peptide
  VARIANT (1)..(16): Xaa = Any Amino Acid
CCELXXACNPXACTGA

SEQ ID NO: 7776 - protein, 17 aa, Artificial Sequence
  Synthetically generated peptide
  VARIANT (1)..(17): Xaa = Any Amino Acid
CCELXXACNPXXACTGA

SEQ ID NO: 7777 - protein, 17 aa, Artificial Sequence
  Synthetically generated peptide
  VARIANT (1)..(17): Xaa = Any Amino Acid
CCELXXACNPXAXCTGA

SEQ ID NO: 7778 - protein, 17 aa, Artificial Sequence
  Synthetically generated peptide
  VARIANT (1)..(17): Xaa = Any Amino Acid
CCELXXACNPXACXTGA

SEQ ID NO: 7779 - protein, 17 aa, Artificial Sequence
  Synthetically generated peptide
  VARIANT (1)..(17): Xaa = Any Amino Acid
CCELXXACNPXACTXGA

SEQ ID NO: 7780 - protein, 17 aa, Artificial Sequence
  Synthetically generated peptide
  VARIANT (1)..(17): Xaa = Any Amino Acid
CCELXXACNPXACTGXA

SEQ ID NO: 7781 - protein, 16 aa, Artificial Sequence
  Synthetically generated peptide
  VARIANT (1)..(16): Xaa = Any Amino Acid
CCELXXACNPAXCTGA

SEQ ID NO: 7782 - protein, 17 aa, Artificial Sequence
  Synthetically generated peptide
  VARIANT (1)..(17): Xaa = Any Amino Acid
CCELXXACNPAXXCTGA

SEQ ID NO: 7783 - protein, 17 aa, Artificial Sequence
  Synthetically generated peptide
  VARIANT (1)..(17): Xaa = Any Amino Acid
CCELXXACNPAXCXTGA

SEQ ID NO: 7784 - protein, 17 aa, Artificial Sequence
  Synthetically generated peptide
  VARIANT (1)..(17): Xaa = Any Amino Acid
CCELXXACNPAXCTXGA

SEQ ID NO: 7785 - protein, 17 aa, Artificial Sequence
  Synthetically generated peptide
  VARIANT (1)..(17): Xaa = Any Amino Acid
CCELXXACNPAXCTGXA

SEQ ID NO: 7786 - protein, 16 aa, Artificial Sequence
  Synthetically generated peptide
  VARIANT (1)..(16): Xaa = Any Amino Acid
CCELXXACNPACXTGA

SEQ ID NO: 7787 - protein, 17 aa, Artificial Sequence
  Synthetically generated peptide
  VARIANT (1)..(17): Xaa = Any Amino Acid
CCELXXACNPACXXTGA

SEQ ID NO: 7788 - protein, 17 aa, Artificial Sequence
  Synthetically generated peptide
  VARIANT (1)..(17): Xaa = Any Amino Acid
CCELXXACNPACXTXGA

SEQ ID NO: 7789 - protein, 17 aa, Artificial Sequence
  Synthetically generated peptide
  VARIANT (1)..(17): Xaa = Any Amino Acid
CCELXXACNPACXTGXA

SEQ ID NO: 7790 - protein, 16 aa, Artificial Sequence
  Synthetically generated peptide
  VARIANT (1)..(16): Xaa = Any Amino Acid
CCELXXACNPACTXGA

SEQ ID NO: 7791 - protein, 17 aa, Artificial Sequence
  Synthetically generated peptide
  VARIANT (1)..(17): Xaa = Any Amino Acid
CCELXXACNPACTXXGA

SEQ ID NO: 7792 - protein, 17 aa, Artificial Sequence
  Synthetically generated peptide
  VARIANT (1)..(17): Xaa = Any Amino Acid
CCELXXACNPACTXGXA

SEQ ID NO: 7793 - protein, 16 aa, Artificial Sequence
  Synthetically generated peptide
  VARIANT (1)..(16): Xaa = Any Amino Acid
CCELXXACNPACTGXA

SEQ ID NO: 7794 - protein, 17 aa, Artificial Sequence
  Synthetically generated peptide
  VARIANT (1)..(17): Xaa = Any Amino Acid
CCELXXACNPACTGXXA

SEQ ID NO: 7795 - protein, 15 aa, Artificial Sequence
  Synthetically generated peptide
  VARIANT (1)..(15): Xaa = Any Amino Acid
CCELXACXNPACTGA

SEQ ID NO: 7796 - protein, 16 aa, Artificial Sequence
  Synthetically generated peptide
  VARIANT (1)..(16): Xaa = Any Amino Acid
CCELXACXXNPACTGA

SEQ ID NO: 7797 - protein, 17 aa, Artificial Sequence
  Synthetically generated peptide
  VARIANT (1)..(17): Xaa = Any Amino Acid
CCELXACXXXNPACTGA

SEQ ID NO: 7798 - protein, 17 aa, Artificial Sequence
  Synthetically generated peptide
  VARIANT (1)..(17): Xaa = Any Amino Acid
CCELXACXXNXPACTGA

SEQ ID NO: 7799 - protein, 17 aa, Artificial Sequence
  Synthetically generated peptide
  VARIANT (1)..(17): Xaa = Any Amino Acid
CCELXACXXNPXACTGA

SEQ ID NO: 7800 - protein, 17 aa, Artificial Sequence
  Synthetically generated peptide
  VARIANT (1)..(17): Xaa = Any Amino Acid
CCELXACXXNPAXCTGA

SEQ ID NO: 7801 - protein, 17 aa, Artificial Sequence
  Synthetically generated peptide
  VARIANT (1)..(17): Xaa = Any Amino Acid
CCELXACXXNPACXTGA

SEQ ID NO: 7802 - protein, 17 aa, Artificial Sequence
  Synthetically generated peptide
  VARIANT (1)..(17): Xaa = Any Amino Acid
CCELXACXXNPACTXGA

SEQ ID NO: 7803 - protein, 17 aa, Artificial Sequence
  Synthetically generated peptide
  VARIANT (1)..(17): Xaa = Any Amino Acid
CCELXACXXNPACTGXA

SEQ ID NO: 7804 - protein, 16 aa, Artificial Sequence
  Synthetically generated peptide
  VARIANT (1)..(16): Xaa = Any Amino Acid
CCELXACXNXPACTGA

SEQ ID NO: 7805 - protein, 17 aa, Artificial Sequence
  Synthetically generated peptide
  VARIANT (1)..(17): Xaa = Any Amino Acid
CCELXACXNXXPACTGA

SEQ ID NO: 7806 - protein, 17 aa, Artificial Sequence
  Synthetically generated peptide
  VARIANT (1)..(17): Xaa = Any Amino Acid
CCELXACXNXPXACTGA

SEQ ID NO: 7807 - protein, 17 aa, Artificial Sequence
  Synthetically generated peptide
  VARIANT (1)..(17): Xaa = Any Amino Acid
CCELXACXNXPAXCTGA

SEQ ID NO: 7808 - protein, 17 aa, Artificial Sequence
  Synthetically generated peptide
  VARIANT (1)..(17): Xaa = Any Amino Acid
CCELXACXNXPACXTGA

SEQ ID NO: 7809 - protein, 17 aa, Artificial Sequence
  Synthetically generated peptide
  VARIANT (1)..(17): Xaa = Any Amino Acid
CCELXACXNXPACTXGA

SEQ ID NO: 7810 - protein, 17 aa, Artificial Sequence
  Synthetically generated peptide
  VARIANT (1)..(17): Xaa = Any Amino Acid
CCELXACXNXPACTGXA

SEQ ID NO: 7811 - protein, 16 aa, Artificial Sequence
  Synthetically generated peptide
  VARIANT (1)..(16): Xaa = Any Amino Acid
CCELXACXNPXACTGA

SEQ ID NO: 7812 - protein, 17 aa, Artificial Sequence
  Synthetically generated peptide
  VARIANT (1)..(17): Xaa = Any Amino Acid
CCELXACXNPXXACTGA

SEQ ID NO: 7813 - protein, 17 aa, Artificial Sequence
  Synthetically generated peptide
  VARIANT (1)..(17): Xaa = Any Amino Acid
CCELXACXNPXAXCTGA

SEQ ID NO: 7814 - protein, 17 aa, Artificial Sequence
  Synthetically generated peptide
  VARIANT (1)..(17): Xaa = Any Amino Acid
CCELXACXNPXACXTGA

SEQ ID NO: 7815 - protein, 17 aa, Artificial Sequence
  Synthetically generated peptide
  VARIANT (1)..(17): Xaa = Any Amino Acid
CCELXACXNPXACTXGA

SEQ ID NO: 7816 - protein, 17 aa, Artificial Sequence
  Synthetically generated peptide
  VARIANT (1)..(17): Xaa = Any Amino Acid
CCELXACXNPXACTGXA

SEQ ID NO: 7817 - protein, 16 aa, Artificial Sequence
  Synthetically generated peptide
  VARIANT (1)..(16): Xaa = Any Amino Acid
CCELXACXNPAXCTGA

SEQ ID NO: 7818 - protein, 17 aa, Artificial Sequence
  Synthetically generated peptide
  VARIANT (1)..(17): Xaa = Any Amino Acid
CCELXACXNPAXXCTGA

SEQ ID NO: 7819 - protein, 17 aa, Artificial Sequence
  Synthetically generated peptide
  VARIANT (1)..(17): Xaa = Any Amino Acid
CCELXACXNPAXCXTGA

SEQ ID NO: 7820 - protein, 17 aa, Artificial Sequence
  Synthetically generated peptide
  VARIANT (1)..(17): Xaa = Any Amino Acid
CCELXACXNPAXCTXGA

SEQ ID NO: 7821 - protein, 17 aa, Artificial Sequence
  Synthetically generated peptide
  VARIANT (1)..(17): Xaa = Any Amino Acid
CCELXACXNPAXCTGXA

SEQ ID NO: 7822 - protein, 16 aa, Artificial Sequence
  Synthetically generated peptide
  VARIANT (1)..(16): Xaa = Any Amino Acid
CCELXACXNPACXTGA

SEQ ID NO: 7823 - protein, 17 aa, Artificial Sequence
  Synthetically generated peptide
  VARIANT (1)..(17): Xaa = Any Amino Acid
CCELXACXNPACXXTGA

SEQ ID NO: 7824 - protein, 17 aa, Artificial Sequence
  Synthetically generated peptide
  VARIANT (1)..(17): Xaa = Any Amino Acid
CCELXACXNPACXTXGA

SEQ ID NO: 7825 - protein, 17 aa, Artificial Sequence
  Synthetically generated peptide
  VARIANT (1)..(17): Xaa = Any Amino Acid
CCELXACXNPACXTGXA

SEQ ID NO: 7826 - protein, 16 aa, Artificial Sequence
  Synthetically generated peptide
  VARIANT (1)..(16): Xaa = Any Amino Acid
CCELXACXNPACTXGA

SEQ ID NO: 7827 - protein, 17 aa, Artificial Sequence
  Synthetically generated peptide
  VARIANT (1)..(17): Xaa = Any Amino Acid
CCELXACXNPACTXXGA

SEQ ID NO: 7828 - protein, 17 aa, Artificial Sequence
  Synthetically generated peptide
  VARIANT (1)..(17): Xaa = Any Amino Acid
CCELXACXNPACTXGXA

SEQ ID NO: 7829 - protein, 16 aa, Artificial Sequence
  Synthetically generated peptide
  VARIANT (1)..(16): Xaa = Any Amino Acid
CCELXACXNPACTGXA

SEQ ID NO: 7830 - protein, 17 aa, Artificial Sequence
  Synthetically generated peptide
  VARIANT (1)..(17): Xaa = Any Amino Acid
CCELXACXNPACTGXXA

SEQ ID NO: 7831 - protein, 15 aa, Artificial Sequence
  Synthetically generated peptide
  VARIANT (1)..(15): Xaa = Any Amino Acid
CCELXACNXPACTGA

SEQ ID NO: 7832 - protein, 16 aa, Artificial Sequence
  Synthetically generated peptide
  VARIANT (1)..(16): Xaa = Any Amino Acid
CCELXACNXXPACTGA

SEQ ID NO: 7833 - protein, 17 aa, Artificial Sequence
  Synthetically generated peptide
  VARIANT (1)..(17): Xaa = Any Amino Acid
CCELXACNXXXPACTGA

SEQ ID NO: 7834 - protein, 17 aa, Artificial Sequence
  Synthetically generated peptide
  VARIANT (1)..(17): Xaa = Any Amino Acid
CCELXACNXXPXACTGA

SEQ ID NO: 7835 - protein, 17 aa, Artificial Sequence
  Synthetically generated peptide
  VARIANT (1)..(17): Xaa = Any Amino Acid
CCELXACNXXPAXCTGA

SEQ ID NO: 7836 - protein, 17 aa, Artificial Sequence
  Synthetically generated peptide
  VARIANT (1)..(17): Xaa = Any Amino Acid
CCELXACNXXPACXTGA

SEQ ID NO: 7837 - protein, 17 aa, Artificial Sequence
  Synthetically generated peptide
  VARIANT (1)..(17): Xaa = Any Amino Acid
CCELXACNXXPACTXGA

SEQ ID NO: 7838 - protein, 17 aa, Artificial Sequence
  Synthetically generated peptide
  VARIANT (1)..(17): Xaa = Any Amino Acid
CCELXACNXXPACTGXA

SEQ ID NO: 7839 - protein, 16 aa, Artificial Sequence
  Synthetically generated peptide
  VARIANT (1)..(16): Xaa = Any Amino Acid
CCELXACNXPXACTGA

SEQ ID NO: 7840 - protein, 17 aa, Artificial Sequence
  Synthetically generated peptide
  VARIANT (1)..(17): Xaa = Any Amino Acid
CCELXACNXPXXACTGA

SEQ ID NO: 7841 - protein, 17 aa, Artificial Sequence
  Synthetically generated peptide
  VARIANT (1)..(17): Xaa = Any Amino Acid
CCELXACNXPXAXCTGA

SEQ ID NO: 7842 - protein, 17 aa, Artificial Sequence
  Synthetically generated peptide
  VARIANT (1)..(17): Xaa = Any Amino Acid
CCELXACNXPXACXTGA

SEQ ID NO: 7843 - protein, 17 aa, Artificial Sequence
  Synthetically generated peptide
  VARIANT (1)..(17): Xaa = Any Amino Acid
CCELXACNXPXACTXGA

SEQ ID NO: 7844 - protein, 17 aa, Artificial Sequence
  Synthetically generated peptide
  VARIANT (1)..(17): Xaa = Any Amino Acid
CCELXACNXPXACTGXA

SEQ ID NO: 7845 - protein, 16 aa, Artificial Sequence
  Synthetically generated peptide
  VARIANT (1)..(16): Xaa = Any Amino Acid
CCELXACNXPAXCTGA

SEQ ID NO: 7846 - protein, 17 aa, Artificial Sequence
  Synthetically generated peptide
  VARIANT (1)..(17): Xaa = Any Amino Acid
CCELXACNXPAXXCTGA

SEQ ID NO: 7847 - protein, 17 aa, Artificial Sequence
  Synthetically generated peptide
  VARIANT (1)..(17): Xaa = Any Amino Acid
CCELXACNXPAXCXTGA

SEQ ID NO: 7848 - protein, 17 aa, Artificial Sequence
  Synthetically generated peptide
  VARIANT (1)..(17): Xaa = Any Amino Acid
CCELXACNXPAXCTXGA

SEQ ID NO: 7849 - protein, 17 aa, Artificial Sequence
  Synthetically generated peptide
  VARIANT (1)..(17): Xaa = Any Amino Acid
CCELXACNXPAXCTGXA

SEQ ID NO: 7850 - protein, 16 aa, Artificial Sequence
  Synthetically generated peptide
  VARIANT (1)..(16): Xaa = Any Amino Acid
CCELXACNXPACXTGA

SEQ ID NO: 7851 - protein, 17 aa, Artificial Sequence
  Synthetically generated peptide
  VARIANT (1)..(17): Xaa = Any Amino Acid
CCELXACNXPACXXTGA

SEQ ID NO: 7852 - protein, 17 aa, Artificial Sequence
  Synthetically generated peptide
  VARIANT (1)..(17): Xaa = Any Amino Acid
CCELXACNXPACXTXGA

SEQ ID NO: 7853 - protein, 17 aa, Artificial Sequence
  Synthetically generated peptide
  VARIANT (1)..(17): Xaa = Any Amino Acid
CCELXACNXPACXTGXA

SEQ ID NO: 7854 - protein, 16 aa, Artificial Sequence
  Synthetically generated peptide
  VARIANT (1)..(16): Xaa = Any Amino Acid
CCELXACNXPACTXGA

SEQ ID NO: 7855 - protein, 17 aa, Artificial Sequence
  Synthetically generated peptide
  VARIANT (1)..(17): Xaa = Any Amino Acid
CCELXACNXPACTXXGA

SEQ ID NO: 7856 - protein, 17 aa, Artificial Sequence
  Synthetically generated peptide
  VARIANT (1)..(17): Xaa = Any Amino Acid
CCELXACNXPACTXGXA

SEQ ID NO: 7857 - protein, 16 aa, Artificial Sequence
  Synthetically generated peptide
  VARIANT (1)..(16): Xaa = Any Amino Acid
CCELXACNXPACTGXA

SEQ ID NO: 7858 - protein, 17 aa, Artificial Sequence
  Synthetically generated peptide
  VARIANT (1)..(17): Xaa = Any Amino Acid
CCELXACNXPACTGXXA

SEQ ID NO: 7859 - protein, 15 aa, Artificial Sequence
  Synthetically generated peptide
  VARIANT (1)..(15): Xaa = Any Amino Acid
CCELXACNPXACTGA

SEQ ID NO: 7860 - protein, 16 aa, Artificial Sequence
  Synthetically generated peptide
  VARIANT (1)..(16): Xaa = Any Amino Acid
CCELXACNPXXACTGA

SEQ ID NO: 7861 - protein, 17 aa, Artificial Sequence
  Synthetically generated peptide
  VARIANT (1)..(17): Xaa = Any Amino Acid
CCELXACNPXXXACTGA

SEQ ID NO: 7862 - protein, 17 aa, Artificial Sequence
  Synthetically generated peptide
  VARIANT (1)..(17): Xaa = Any Amino Acid
CCELXACNPXXAXCTGA

SEQ ID NO: 7863 - protein, 17 aa, Artificial Sequence
  Synthetically generated peptide
  VARIANT (1)..(17): Xaa = Any Amino Acid
CCELXACNPXXACXTGA

SEQ ID NO: 7864 - protein, 17 aa, Artificial Sequence
  Synthetically generated peptide
  VARIANT (1)..(17): Xaa = Any Amino Acid
CCELXACNPXXACTXGA

SEQ ID NO: 7865 - protein, 17 aa, Artificial Sequence
  Synthetically generated peptide
  VARIANT (1)..(17): Xaa = Any Amino Acid
CCELXACNPXXACTGXA

SEQ ID NO: 7866 - protein, 16 aa, Artificial Sequence
  Synthetically generated peptide
  VARIANT (1)..(16): Xaa = Any Amino Acid
CCELXACNPXAXCTGA

SEQ ID NO: 7867 - protein, 17 aa, Artificial Sequence
  Synthetically generated peptide
  VARIANT (1)..(17): Xaa = Any Amino Acid
CCELXACNPXAXXCTGA

SEQ ID NO: 7868 - protein, 17 aa, Artificial Sequence
  Synthetically generated peptide
  VARIANT (1)..(17): Xaa = Any Amino Acid
CCELXACNPXAXCXTGA

SEQ ID NO: 7869 - protein, 17 aa, Artificial Sequence
  Synthetically generated peptide
  VARIANT (1)..(17): Xaa = Any Amino Acid
CCELXACNPXAXCTXGA

SEQ ID NO: 7870 - protein, 17 aa, Artificial Sequence
  Synthetically generated peptide
  VARIANT (1)..(17): Xaa = Any Amino Acid
CCELXACNPXAXCTGXA

SEQ ID NO: 7871 - protein, 16 aa, Artificial Sequence
  Synthetically generated peptide
  VARIANT (1)..(16): Xaa = Any Amino Acid
CCELXACNPXACXTGA

SEQ ID NO: 7872 - protein, 17 aa, Artificial Sequence
  Synthetically generated peptide
  VARIANT (1)..(17): Xaa = Any Amino Acid
CCELXACNPXACXXTGA

SEQ ID NO: 7873 - protein, 17 aa, Artificial Sequence
  Synthetically generated peptide
  VARIANT (1)..(17): Xaa = Any Amino Acid
CCELXACNPXACXTXGA

SEQ ID NO: 7874 - protein, 17 aa, Artificial Sequence
  Synthetically generated peptide
  VARIANT (1)..(17): Xaa = Any Amino Acid
CCELXACNPXACXTGXA

SEQ ID NO: 7875 - protein, 16 aa, Artificial Sequence
  Synthetically generated peptide
  VARIANT (1)..(16): Xaa = Any Amino Acid
CCELXACNPXACTXGA

SEQ ID NO: 7876 - protein, 17 aa, Artificial Sequence
  Synthetically generated peptide
  VARIANT (1)..(17): Xaa = Any Amino Acid
CCELXACNPXACTXXGA

SEQ ID NO: 7877 - protein, 17 aa, Artificial Sequence
  Synthetically generated peptide
  VARIANT (1)..(17): Xaa = Any Amino Acid
CCELXACNPXACTXGXA

SEQ ID NO: 7878 - protein, 16 aa, Artificial Sequence
  Synthetically generated peptide
  VARIANT (1)..(16): Xaa = Any Amino Acid
CCELXACNPXACTGXA

SEQ ID NO: 7879 - protein, 17 aa, Artificial Sequence
  Synthetically generated peptide
  VARIANT (1)..(17): Xaa = Any Amino Acid
CCELXACNPXACTGXXA

SEQ ID NO: 7880 - protein, 15 aa, Artificial Sequence
  Synthetically generated peptide
  VARIANT (1)..(15): Xaa = Any Amino Acid
CCELXACNPAXCTGA

SEQ ID NO: 7881 - protein, 16 aa, Artificial Sequence
  Synthetically generated peptide
  VARIANT (1)..(16): Xaa = Any Amino Acid
CCELXACNPAXXCTGA

SEQ ID NO: 7882 - protein, 17 aa, Artificial Sequence
  Synthetically generated peptide
  VARIANT (1)..(17): Xaa = Any Amino Acid
CCELXACNPAXXXCTGA

SEQ ID NO: 7883 - protein, 17 aa, Artificial Sequence
  Synthetically generated peptide
  VARIANT (1)..(17): Xaa = Any Amino Acid
CCELXACNPAXXCXTGA

SEQ ID NO: 7884 - protein, 17 aa, Artificial Sequence
  Synthetically generated peptide
  VARIANT (1)..(17): Xaa = Any Amino Acid
CCELXACNPAXXCTXGA

SEQ ID NO: 7885 - protein, 17 aa, Artificial Sequence
  Synthetically generated peptide
  VARIANT (1)..(17): Xaa = Any Amino Acid
CCELXACNPAXXCTGXA

SEQ ID NO: 7886 - protein, 16 aa, Artificial Sequence
  Synthetically generated peptide
  VARIANT (1)..(16): Xaa = Any Amino Acid
CCELXACNPAXCXTGA

SEQ ID NO: 7887 - protein, 17 aa, Artificial Sequence
  Synthetically generated peptide
  VARIANT (1)..(17): Xaa = Any Amino Acid
CCELXACNPAXCXXTGA

SEQ ID NO: 7888 - protein, 17 aa, Artificial Sequence
  Synthetically generated peptide
  VARIANT (1)..(17): Xaa = Any Amino Acid
CCELXACNPAXCXTXGA

SEQ ID NO: 7889 - protein, 17 aa, Artificial Sequence
  Synthetically generated peptide
  VARIANT (1)..(17): Xaa = Any Amino Acid
CCELXACNPAXCXTGXA

SEQ ID NO: 7890 - protein, 16 aa, Artificial Sequence
  Synthetically generated peptide
  VARIANT (1)..(16): Xaa = Any Amino Acid
CCELXACNPAXCTXGA

SEQ ID NO: 7891 - protein, 17 aa, Artificial Sequence
  Synthetically generated peptide
  VARIANT (1)..(17): Xaa = Any Amino Acid
CCELXACNPAXCTXXGA

SEQ ID NO: 7892 - protein, 17 aa, Artificial Sequence
  Synthetically generated peptide
  VARIANT (1)..(17): Xaa = Any Amino Acid
CCELXACNPAXCTXGXA

SEQ ID NO: 7893 - protein, 16 aa, Artificial Sequence
  Synthetically generated peptide
  VARIANT (1)..(16): Xaa = Any Amino Acid
CCELXACNPAXCTGXA

SEQ ID NO: 7894 - protein, 17 aa, Artificial Sequence
  Synthetically generated peptide
  VARIANT (1)..(17): Xaa = Any Amino Acid
CCELXACNPAXCTGXXA

SEQ ID NO: 7895 - protein, 15 aa, Artificial Sequence
  Synthetically generated peptide
  VARIANT (1)..(15): Xaa = Any Amino Acid
CCELXACNPACXTGA

SEQ ID NO: 7896 - protein, 16 aa, Artificial Sequence
  Synthetically generated peptide
  VARIANT (1)..(16): Xaa = Any Amino Acid
CCELXACNPACXXTGA

SEQ ID NO: 7897 - protein, 17 aa, Artificial Sequence
  Synthetically generated peptide
  VARIANT (1)..(17): Xaa = Any Amino Acid
CCELXACNPACXXXTGA

SEQ ID NO: 7898 - protein, 17 aa, Artificial Sequence
  Synthetically generated peptide
  VARIANT (1)..(17): Xaa = Any Amino Acid
CCELXACNPACXXTXGA

SEQ ID NO: 7899 - protein, 17 aa, Artificial Sequence
  Synthetically generated peptide
  VARIANT (1)..(17): Xaa = Any Amino Acid
CCELXACNPACXXTGXA

SEQ ID NO: 7900 - protein, 16 aa, Artificial Sequence
  Synthetically generated peptide
  VARIANT (1)..(16): Xaa = Any Amino Acid
CCELXACNPACXTXGA

SEQ ID NO: 7901 - protein, 17 aa, Artificial Sequence
  Synthetically generated peptide
  VARIANT (1)..(17): Xaa = Any Amino Acid
CCELXACNPACXTXXGA

SEQ ID NO: 7902 - protein, 17 aa, Artificial Sequence
  Synthetically generated peptide
  VARIANT (1)..(17): Xaa = Any Amino Acid
CCELXACNPACXTXGXA

SEQ ID NO: 7903 - protein, 16 aa, Artificial Sequence
  Synthetically generated peptide
  VARIANT (1)..(16): Xaa = Any Amino Acid
CCELXACNPACXTGXA

SEQ ID NO: 7904 - protein, 17 aa, Artificial Sequence
  Synthetically generated peptide
  VARIANT (1)..(17): Xaa = Any Amino Acid
CCELXACNPACXTGXXA

SEQ ID NO: 7905 - protein, 15 aa, Artificial Sequence
  Synthetically generated peptide
  VARIANT (1)..(15): Xaa = Any Amino Acid
CCELXACNPACTXGA

SEQ ID NO: 7906 - protein, 16 aa, Artificial Sequence
  Synthetically generated peptide
  VARIANT (1)..(16): Xaa = Any Amino Acid
CCELXACNPACTXXGA

SEQ ID NO: 7907 - protein, 17 aa, Artificial Sequence
  Synthetically generated peptide
  VARIANT (1)..(17): Xaa = Any Amino Acid
CCELXACNPACTXXXGA

SEQ ID NO: 7908 - protein, 17 aa, Artificial Sequence
  Synthetically generated peptide
  VARIANT (1)..(17): Xaa = Any Amino Acid
CCELXACNPACTXXGXA

SEQ ID NO: 7909 - protein, 16 aa, Artificial Sequence
  Synthetically generated peptide
  VARIANT (1)..(16): Xaa = Any Amino Acid
CCELXACNPACTXGXA

SEQ ID NO: 7910 - protein, 17 aa, Artificial Sequence
  Synthetically generated peptide
  VARIANT (1)..(17): Xaa = Any Amino Acid
CCELXACNPACTXGXXA

SEQ ID NO: 7911 - protein, 15 aa, Artificial Sequence
  Synthetically generated peptide
  VARIANT (1)..(15): Xaa = Any Amino Acid
CCELXACNPACTGXA

SEQ ID NO: 7912 - protein, 16 aa, Artificial Sequence
  Synthetically generated peptide
  VARIANT (1)..(16): Xaa = Any Amino Acid
CCELXACNPACTGXXA

SEQ ID NO: 7913 - protein, 17 aa, Artificial Sequence
  Synthetically generated peptide
  VARIANT (1)..(17): Xaa = Any Amino Acid
CCELXACNPACTGXXXA

SEQ ID NO: 7914 - protein, 14 aa, Artificial Sequence
  Synthetically generated peptide
  VARIANT (1)..(14): Xaa = Any Amino Acid
CCELACXNPACTGA

SEQ ID NO: 7915 - protein, 15 aa, Artificial Sequence
  Synthetically generated peptide
  VARIANT (1)..(15): Xaa = Any Amino Acid
CCELACXXNPACTGA

SEQ ID NO: 7916 - protein, 16 aa, Artificial Sequence
  Synthetically generated peptide
  VARIANT (1)..(16): Xaa = Any Amino Acid
CCELACXXXNPACTGA

SEQ ID NO: 7917 - protein, 17 aa, Artificial Sequence
  Synthetically generated peptide
  VARIANT (1)..(17): Xaa = Any Amino Acid
CCELACXXXXNPACTGA

SEQ ID NO: 7918 - protein, 17 aa, Artificial Sequence
  Synthetically generated peptide
  VARIANT (1)..(17): Xaa = Any Amino Acid
CCELACXXXNXPACTGA

SEQ ID NO: 7919 - protein, 17 aa, Artificial Sequence
  Synthetically generated peptide
  VARIANT (1)..(17): Xaa = Any Amino Acid
CCELACXXXNPXACTGA

SEQ ID NO: 7920 - protein, 17 aa, Artificial Sequence
  Synthetically generated peptide
  VARIANT (1)..(17): Xaa = Any Amino Acid
CCELACXXXNPAXCTGA

SEQ ID NO: 7921 - protein, 17 aa, Artificial Sequence
  Synthetically generated peptide
  VARIANT (1)..(17): Xaa = Any Amino Acid
CCELACXXXNPACXTGA

SEQ ID NO: 7922 - protein, 17 aa, Artificial Sequence
  Synthetically generated peptide
  VARIANT (1)..(17): Xaa = Any Amino Acid
CCELACXXXNPACTXGA

SEQ ID NO: 7923 - protein, 17 aa, Artificial Sequence
  Synthetically generated peptide
  VARIANT (1)..(17): Xaa = Any Amino Acid
CCELACXXXNPACTGXA

SEQ ID NO: 7924 - protein, 16 aa, Artificial Sequence
  Synthetically generated peptide
  VARIANT (1)..(16): Xaa = Any Amino Acid
CCELACXXNXPACTGA

SEQ ID NO: 7925 - protein, 17 aa, Artificial Sequence
  Synthetically generated peptide
  VARIANT (1)..(17): Xaa = Any Amino Acid
CCELACXXNXXPACTGA

SEQ ID NO: 7926 - protein, 17 aa, Artificial Sequence
  Synthetically generated peptide
  VARIANT (1)..(17): Xaa = Any Amino Acid
CCELACXXNXPXACTGA

SEQ ID NO: 7927 - protein, 17 aa, Artificial Sequence
  Synthetically generated peptide
  VARIANT (1)..(17): Xaa = Any Amino Acid
CCELACXXNXPAXCTGA

SEQ ID NO: 7928 - protein, 17 aa, Artificial Sequence
  Synthetically generated peptide
  VARIANT (1)..(17): Xaa = Any Amino Acid
CCELACXXNXPACXTGA

SEQ ID NO: 7929 - protein, 17 aa, Artificial Sequence
  Synthetically generated peptide
  VARIANT (1)..(17): Xaa = Any Amino Acid
CCELACXXNXPACTXGA

SEQ ID NO: 7930 - protein, 17 aa, Artificial Sequence
  Synthetically generated peptide
  VARIANT (1)..(17): Xaa = Any Amino Acid
CCELACXXNXPACTGXA

SEQ ID NO: 7931 - protein, 16 aa, Artificial Sequence
  Synthetically generated peptide
  VARIANT (1)..(16): Xaa = Any Amino Acid
CCELACXXNPXACTGA

SEQ ID NO: 7932 - protein, 17 aa, Artificial Sequence
  Synthetically generated peptide
  VARIANT (1)..(17): Xaa = Any Amino Acid
CCELACXXNPXXACTGA

SEQ ID NO: 7933 - protein, 17 aa, Artificial Sequence
  Synthetically generated peptide
  VARIANT (1)..(17): Xaa = Any Amino Acid
CCELACXXNPXAXCTGA

SEQ ID NO: 7934 - protein, 17 aa, Artificial Sequence
  Synthetically generated peptide
  VARIANT (1)..(17): Xaa = Any Amino Acid
CCELACXXNPXACXTGA

SEQ ID NO: 7935 - protein, 17 aa, Artificial Sequence
  Synthetically generated peptide
  VARIANT (1)..(17): Xaa = Any Amino Acid
CCELACXXNPXACTXGA

SEQ ID NO: 7936 - protein, 17 aa, Artificial Sequence
  Synthetically generated peptide
  VARIANT (1)..(17): Xaa = Any Amino Acid
CCELACXXNPXACTGXA

SEQ ID NO: 7937 - protein, 16 aa, Artificial Sequence
  Synthetically generated peptide
  VARIANT (1)..(16): Xaa = Any Amino Acid
CCELACXXNPAXCTGA

SEQ ID NO: 7938 - protein, 17 aa, Artificial Sequence
  Synthetically generated peptide
  VARIANT (1)..(17): Xaa = Any Amino Acid
CCELACXXNPAXXCTGA

SEQ ID NO: 7939 - protein, 17 aa, Artificial Sequence
  Synthetically generated peptide
  VARIANT (1)..(17): Xaa = Any Amino Acid
CCELACXXNPAXCXTGA

SEQ ID NO: 7940 - protein, 17 aa, Artificial Sequence
  Synthetically generated peptide
  VARIANT (1)..(17): Xaa = Any Amino Acid
CCELACXXNPAXCTXGA

SEQ ID NO: 7941 - protein, 17 aa, Artificial Sequence
  Synthetically generated peptide
  VARIANT (1)..(17): Xaa = Any Amino Acid
CCELACXXNPAXCTGXA

SEQ ID NO: 7942 - protein, 16 aa, Artificial Sequence
  Synthetically generated peptide
  VARIANT (1)..(16): Xaa = Any Amino Acid
CCELACXXNPACXTGA

SEQ ID NO: 7943 - protein, 17 aa, Artificial Sequence
  Synthetically generated peptide
  VARIANT (1)..(17): Xaa = Any Amino Acid
CCELACXXNPACXXTGA

SEQ ID NO: 7944 - protein, 17 aa, Artificial Sequence
  Synthetically generated peptide
  VARIANT (1)..(17): Xaa = Any Amino Acid
CCELACXXNPACXTXGA

SEQ ID NO: 7945 - protein, 17 aa, Artificial Sequence
  Synthetically generated peptide
  VARIANT (1)..(17): Xaa = Any Amino Acid
CCELACXXNPACXTGXA

SEQ ID NO: 7946 - protein, 16 aa, Artificial Sequence
  Synthetically generated peptide
  VARIANT (1)..(16): Xaa = Any Amino Acid
CCELACXXNPACTXGA

SEQ ID NO: 7947 - protein, 17 aa, Artificial Sequence
  Synthetically generated peptide
  VARIANT (1)..(17): Xaa = Any Amino Acid
CCELACXXNPACTXXGA

SEQ ID NO: 7948 - protein, 17 aa, Artificial Sequence
  Synthetically generated peptide
  VARIANT (1)..(17): Xaa = Any Amino Acid
CCELACXXNPACTXGXA

SEQ ID NO: 7949 - protein, 16 aa, Artificial Sequence
  Synthetically generated peptide
  VARIANT (1)..(16): Xaa = Any Amino Acid
CCELACXXNPACTGXA

SEQ ID NO: 7950 - protein, 17 aa, Artificial Sequence
  Synthetically generated peptide
  VARIANT (1)..(17): Xaa = Any Amino Acid
CCELACXXNPACTGXXA

SEQ ID NO: 7951 - protein, 15 aa, Artificial Sequence
  Synthetically generated peptide
  VARIANT (1)..(15): Xaa = Any Amino Acid
CCELACXNXPACTGA

SEQ ID NO: 7952 - protein, 16 aa, Artificial Sequence
  Synthetically generated peptide
  VARIANT (1)..(16): Xaa = Any Amino Acid
CCELACXNXXPACTGA

SEQ ID NO: 7953 - protein, 17 aa, Artificial Sequence
  Synthetically generated peptide
  VARIANT (1)..(17): Xaa = Any Amino Acid
CCELACXNXXXPACTGA

SEQ ID NO: 7954 - protein, 17 aa, Artificial Sequence
  Synthetically generated peptide
  VARIANT (1)..(17): Xaa = Any Amino Acid
CCELACXNXXPXACTGA

SEQ ID NO: 7955 - protein, 17 aa, Artificial Sequence
  Synthetically generated peptide
  VARIANT (1)..(17): Xaa = Any Amino Acid
CCELACXNXXPAXCTGA

SEQ ID NO: 7956 - protein, 17 aa, Artificial Sequence
  Synthetically generated peptide
  VARIANT (1)..(17): Xaa = Any Amino Acid
CCELACXNXXPACXTGA

SEQ ID NO: 7957 - protein, 17 aa, Artificial Sequence
  Synthetically generated peptide
  VARIANT (1)..(17): Xaa = Any Amino Acid
CCELACXNXXPACTXGA

SEQ ID NO: 7958 - protein, 17 aa, Artificial Sequence
  Synthetically generated peptide
  VARIANT (1)..(17): Xaa = Any Amino Acid
CCELACXNXXPACTGXA

SEQ ID NO: 7959 - protein, 16 aa, Artificial Sequence
  Synthetically generated peptide
  VARIANT (1)..(16): Xaa = Any Amino Acid
CCELACXNXPXACTGA

SEQ ID NO: 7960 - protein, 17 aa, Artificial Sequence
  Synthetically generated peptide
  VARIANT (1)..(17): Xaa = Any Amino Acid
CCELACXNXPXXACTGA

SEQ ID NO: 7961 - protein, 17 aa, Artificial Sequence
  Synthetically generated peptide
  VARIANT (1)..(17): Xaa = Any Amino Acid
CCELACXNXPXAXCTGA

SEQ ID NO: 7962 - protein, 17 aa, Artificial Sequence
  Synthetically generated peptide
  VARIANT (1)..(17): Xaa = Any Amino Acid
CCELACXNXPXACXTGA

SEQ ID NO: 7963 - protein, 17 aa, Artificial Sequence
  Synthetically generated peptide
  VARIANT (1)..(17): Xaa = Any Amino Acid
CCELACXNXPXACTXGA

SEQ ID NO: 7964 - protein, 17 aa, Artificial Sequence
  Synthetically generated peptide
  VARIANT (1)..(17): Xaa = Any Amino Acid
CCELACXNXPXACTGXA

SEQ ID NO: 7965 - protein, 16 aa, Artificial Sequence
  Synthetically generated peptide
  VARIANT (1)..(16): Xaa = Any Amino Acid
CCELACXNXPAXCTGA

SEQ ID NO: 7966 - protein, 17 aa, Artificial Sequence
  Synthetically generated peptide
  VARIANT (1)..(17): Xaa = Any Amino Acid
CCELACXNXPAXXCTGA

SEQ ID NO: 7967 - protein, 17 aa, Artificial Sequence
  Synthetically generated peptide
  VARIANT (1)..(17): Xaa = Any Amino Acid
CCELACXNXPAXCXTGA

SEQ ID NO: 7968 - protein, 17 aa, Artificial Sequence
  Synthetically generated peptide
  VARIANT (1)..(17): Xaa = Any Amino Acid
CCELACXNXPAXCTXGA

SEQ ID NO: 7969 - protein, 17 aa, Artificial Sequence
  Synthetically generated peptide
  VARIANT (1)..(17): Xaa = Any Amino Acid
CCELACXNXPAXCTGXA

SEQ ID NO: 7970 - protein, 16 aa, Artificial Sequence
  Synthetically generated peptide
  VARIANT (1)..(16): Xaa = Any Amino Acid
CCELACXNXPACXTGA

SEQ ID NO: 7971 - protein, 17 aa, Artificial Sequence
  Synthetically generated peptide
  VARIANT (1)..(17): Xaa = Any Amino Acid
CCELACXNXPACXXTGA

SEQ ID NO: 7972 - protein, 17 aa, Artificial Sequence
  Synthetically generated peptide
  VARIANT (1)..(17): Xaa = Any Amino Acid
CCELACXNXPACXTXGA

SEQ ID NO: 7973 - protein, 17 aa, Artificial Sequence
  Synthetically generated peptide
  VARIANT (1)..(17): Xaa = Any Amino Acid
CCELACXNXPACXTGXA

SEQ ID NO: 7974 - protein, 16 aa, Artificial Sequence
  Synthetically generated peptide
  VARIANT (1)..(16): Xaa = Any Amino Acid
CCELACXNXPACTXGA

SEQ ID NO: 7975 - protein, 17 aa, Artificial Sequence
  Synthetically generated peptide
  VARIANT (1)..(17): Xaa = Any Amino Acid
CCELACXNXPACTXXGA

SEQ ID NO: 7976 - protein, 17 aa, Artificial Sequence
  Synthetically generated peptide
  VARIANT (1)..(17): Xaa = Any Amino Acid
CCELACXNXPACTXGXA

SEQ ID NO: 7977 - protein, 16 aa, Artificial Sequence
  Synthetically generated peptide
  VARIANT (1)..(16): Xaa = Any Amino Acid
CCELACXNXPACTGXA

SEQ ID NO: 7978 - protein, 17 aa, Artificial Sequence
  Synthetically generated peptide
  VARIANT (1)..(17): Xaa = Any Amino Acid
CCELACXNXPACTGXXA

SEQ ID NO: 7979 - protein, 15 aa, Artificial Sequence
  Synthetically generated peptide
  VARIANT (1)..(15): Xaa = Any Amino Acid
CCELACXNPXACTGA

SEQ ID NO: 7980 - protein, 16 aa, Artificial Sequence
  Synthetically generated peptide
  VARIANT (1)..(16): Xaa = Any Amino Acid
CCELACXNPXXACTGA

SEQ ID NO: 7981 - protein, 17 aa, Artificial Sequence
  Synthetically generated peptide
  VARIANT (1)..(17): Xaa = Any Amino Acid
CCELACXNPXXXACTGA

SEQ ID NO: 7982 - protein, 17 aa, Artificial Sequence
  Synthetically generated peptide
  VARIANT (1)..(17): Xaa = Any Amino Acid
CCELACXNPXXAXCTGA

SEQ ID NO: 7983 - protein, 17 aa, Artificial Sequence
  Synthetically generated peptide
  VARIANT (1)..(17): Xaa = Any Amino Acid
CCELACXNPXXACXTGA

SEQ ID NO: 7984 - protein, 17 aa, Artificial Sequence
  Synthetically generated peptide
  VARIANT (1)..(17): Xaa = Any Amino Acid
CCELACXNPXXACTXGA

SEQ ID NO: 7985 - protein, 17 aa, Artificial Sequence
  Synthetically generated peptide
  VARIANT (1)..(17): Xaa = Any Amino Acid
CCELACXNPXXACTGXA

SEQ ID NO: 7986 - protein, 16 aa, Artificial Sequence
  Synthetically generated peptide
  VARIANT (1)..(16): Xaa = Any Amino Acid
CCELACXNPXAXCTGA

SEQ ID NO: 7987 - protein, 17 aa, Artificial Sequence
  Synthetically generated peptide
  VARIANT (1)..(17): Xaa = Any Amino Acid
CCELACXNPXAXXCTGA

SEQ ID NO: 7988 - protein, 17 aa, Artificial Sequence
  Synthetically generated peptide
  VARIANT (1)..(17): Xaa = Any Amino Acid
CCELACXNPXAXCXTGA

SEQ ID NO: 7989 - protein, 17 aa, Artificial Sequence
  Synthetically generated peptide
  VARIANT (1)..(17): Xaa = Any Amino Acid
CCELACXNPXAXCTXGA

SEQ ID NO: 7990 - protein, 17 aa, Artificial Sequence
  Synthetically generated peptide
  VARIANT (1)..(17): Xaa = Any Amino Acid
CCELACXNPXAXCTGXA

SEQ ID NO: 7991 - protein, 16 aa, Artificial Sequence
  Synthetically generated peptide
  VARIANT (1)..(16): Xaa = Any Amino Acid
CCELACXNPXACXTGA

SEQ ID NO: 7992 - protein, 17 aa, Artificial Sequence
  Synthetically generated peptide
  VARIANT (1)..(17): Xaa = Any Amino Acid
CCELACXNPXACXXTGA

SEQ ID NO: 7993 - protein, 17 aa, Artificial Sequence
  Synthetically generated peptide
  VARIANT (1)..(17): Xaa = Any Amino Acid
CCELACXNPXACXTXGA

SEQ ID NO: 7994 - protein, 17 aa, Artificial Sequence
  Synthetically generated peptide
  VARIANT (1)..(17): Xaa = Any Amino Acid
CCELACXNPXACXTGXA

SEQ ID NO: 7995 - protein, 16 aa, Artificial Sequence
  Synthetically generated peptide
  VARIANT (1)..(16): Xaa = Any Amino Acid
CCELACXNPXACTXGA

SEQ ID NO: 7996 - protein, 17 aa, Artificial Sequence
  Synthetically generated peptide
  VARIANT (1)..(17): Xaa = Any Amino Acid
CCELACXNPXACTXXGA

SEQ ID NO: 7997 - protein, 17 aa, Artificial Sequence
  Synthetically generated peptide
  VARIANT (1)..(17): Xaa = Any Amino Acid
CCELACXNPXACTXGXA

SEQ ID NO: 7998 - protein, 16 aa, Artificial Sequence
  Synthetically generated peptide
  VARIANT (1)..(16): Xaa = Any Amino Acid
CCELACXNPXACTGXA

SEQ ID NO: 7999 - protein, 17 aa, Artificial Sequence
  Synthetically generated peptide
  VARIANT (1)..(17): Xaa = Any Amino Acid
CCELACXNPXACTGXXA

SEQ ID NO: 8000 - protein, 15 aa, Artificial Sequence
  Synthetically generated peptide
  VARIANT (1)..(15): Xaa = Any Amino Acid
CCELACXNPAXCTGA

SEQ ID NO: 8001 - protein, 16 aa, Artificial Sequence
  Synthetically generated peptide
  VARIANT (1)..(16): Xaa = Any Amino Acid
CCELACXNPAXXCTGA

SEQ ID NO: 8002 - protein, 17 aa, Artificial Sequence
  Synthetically generated peptide
  VARIANT (1)..(17): Xaa = Any Amino Acid
CCELACXNPAXXXCTGA

SEQ ID NO: 8003 - protein, 17 aa, Artificial Sequence
  Synthetically generated peptide
  VARIANT (1)..(17): Xaa = Any Amino Acid
CCELACXNPAXXCXTGA

SEQ ID NO: 8004 - protein, 17 aa, Artificial Sequence
  Synthetically generated peptide
  VARIANT (1)..(17): Xaa = Any Amino Acid
CCELACXNPAXXCTXGA

SEQ ID NO: 8005 - protein, 17 aa, Artificial Sequence
  Synthetically generated peptide
  VARIANT (1)..(17): Xaa = Any Amino Acid
CCELACXNPAXXCTGXA

SEQ ID NO: 8006 - protein, 16 aa, Artificial Sequence
  Synthetically generated peptide
  VARIANT (1)..(16): Xaa = Any Amino Acid
CCELACXNPAXCXTGA

SEQ ID NO: 8007 - protein, 17 aa, Artificial Sequence
  Synthetically generated peptide
  VARIANT (1)..(17): Xaa = Any Amino Acid
CCELACXNPAXCXXTGA

SEQ ID NO: 8008 - protein, 17 aa, Artificial Sequence
  Synthetically generated peptide
  VARIANT (1)..(17): Xaa = Any Amino Acid
CCELACXNPAXCXTXGA

SEQ ID NO: 8009 - protein, 17 aa, Artificial Sequence
  Synthetically generated peptide
  VARIANT (1)..(17): Xaa = Any Amino Acid
CCELACXNPAXCXTGXA

SEQ ID NO: 8010 - protein, 16 aa, Artificial Sequence
  Synthetically generated peptide
  VARIANT (1)..(16): Xaa = Any Amino Acid
CCELACXNPAXCTXGA

SEQ ID NO: 8011 - protein, 17 aa, Artificial Sequence
  Synthetically generated peptide
  VARIANT (1)..(17): Xaa = Any Amino Acid
CCELACXNPAXCTXXGA

SEQ ID NO: 8012 - protein, 17 aa, Artificial Sequence
  Synthetically generated peptide
  VARIANT (1)..(17): Xaa = Any Amino Acid
CCELACXNPAXCTXGXA

SEQ ID NO: 8013 - protein, 16 aa, Artificial Sequence
  Synthetically generated peptide
  VARIANT (1)..(16): Xaa = Any Amino Acid
CCELACXNPAXCTGXA

SEQ ID NO: 8014 - protein, 17 aa, Artificial Sequence
  Synthetically generated peptide
  VARIANT (1)..(17): Xaa = Any Amino Acid
CCELACXNPAXCTGXXA

SEQ ID NO: 8015 - protein, 15 aa, Artificial Sequence
  Synthetically generated peptide
  VARIANT (1)..(15): Xaa = Any Amino Acid
CCELACXNPACXTGA

SEQ ID NO: 8016 - protein, 16 aa, Artificial Sequence
  Synthetically generated peptide
  VARIANT (1)..(16): Xaa = Any Amino Acid
CCELACXNPACXXTGA

SEQ ID NO: 8017 - protein, 17 aa, Artificial Sequence
  Synthetically generated peptide
  VARIANT (1)..(17): Xaa = Any Amino Acid
CCELACXNPACXXXTGA

SEQ ID NO: 8018 - protein, 17 aa, Artificial Sequence
  Synthetically generated peptide
  VARIANT (1)..(17): Xaa = Any Amino Acid
CCELACXNPACXXTXGA

SEQ ID NO: 8019 - protein, 17 aa, Artificial Sequence
  Synthetically generated peptide
  VARIANT (1)..(17): Xaa = Any Amino Acid
CCELACXNPACXXTGXA

SEQ ID NO: 8020 - protein, 16 aa, Artificial Sequence
  Synthetically generated peptide
  VARIANT (1)..(16): Xaa = Any Amino Acid
CCELACXNPACXTXGA

SEQ ID NO: 8021 - protein, 17 aa, Artificial Sequence
  Synthetically generated peptide
  VARIANT (1)..(17): Xaa = Any Amino Acid
CCELACXNPACXTXXGA

SEQ ID NO: 8022 - protein, 17 aa, Artificial Sequence
  Synthetically generated peptide
  VARIANT (1)..(17): Xaa = Any Amino Acid
CCELACXNPACXTXGXA

SEQ ID NO: 8023 - protein, 16 aa, Artificial Sequence
  Synthetically generated peptide
  VARIANT (1)..(16): Xaa = Any Amino Acid
CCELACXNPACXTGXA

SEQ ID NO: 8024 - protein, 17 aa, Artificial Sequence
  Synthetically generated peptide
  VARIANT (1)..(17): Xaa = Any Amino Acid
CCELACXNPACXTGXXA

SEQ ID NO: 8025 - protein, 15 aa, Artificial Sequence
  Synthetically generated peptide
  VARIANT (1)..(15): Xaa = Any Amino Acid
CCELACXNPACTXGA

SEQ ID NO: 8026 - protein, 16 aa, Artificial Sequence
  Synthetically generated peptide
  VARIANT (1)..(16): Xaa = Any Amino Acid
CCELACXNPACTXXGA

SEQ ID NO: 8027 - protein, 17 aa, Artificial Sequence
  Synthetically generated peptide
  VARIANT (1)..(17): Xaa = Any Amino Acid
CCELACXNPACTXXXGA

SEQ ID NO: 8028 - protein, 17 aa, Artificial Sequence
  Synthetically generated peptide
  VARIANT (1)..(17): Xaa = Any Amino Acid
CCELACXNPACTXXGXA

SEQ ID NO: 8029 - protein, 16 aa, Artificial Sequence
  Synthetically generated peptide
  VARIANT (1)..(16): Xaa = Any Amino Acid
CCELACXNPACTXGXA

SEQ ID NO: 8030 - protein, 17 aa, Artificial Sequence
  Synthetically generated peptide
  VARIANT (1)..(17): Xaa = Any Amino Acid
CCELACXNPACTXGXXA

SEQ ID NO: 8031 - protein, 15 aa, Artificial Sequence
  Synthetically generated peptide
  VARIANT (1)..(15): Xaa = Any Amino Acid
CCELACXNPACTGXA

SEQ ID NO: 8032 - protein, 16 aa, Artificial Sequence
  Synthetically generated peptide
  VARIANT (1)..(16): Xaa = Any Amino Acid
CCELACXNPACTGXXA

SEQ ID NO: 8033 - protein, 17 aa, Artificial Sequence
  Synthetically generated peptide
  VARIANT (1)..(17): Xaa = Any Amino Acid
CCELACXNPACTGXXXA

SEQ ID NO: 8034 - protein, 14 aa, Artificial Sequence
  Synthetically generated peptide
  VARIANT (1)..(14): Xaa = Any Amino Acid
CCELACNXPACTGA

SEQ ID NO: 8035 - protein, 15 aa, Artificial Sequence
  Synthetically generated peptide
  VARIANT (1)..(15): Xaa = Any Amino Acid
CCELACNXXPACTGA

SEQ ID NO: 8036 - protein, 16 aa, Artificial Sequence
  Synthetically generated peptide
  VARIANT (1)..(16): Xaa = Any Amino Acid
CCELACNXXXPACTGA

SEQ ID NO: 8037 - protein, 17 aa, Artificial Sequence
  Synthetically generated peptide
  VARIANT (1)..(17): Xaa = Any Amino Acid
CCELACNXXXXPACTGA

SEQ ID NO: 8038 - protein, 17 aa, Artificial Sequence
  Synthetically generated peptide
  VARIANT (1)..(17): Xaa = Any Amino Acid
CCELACNXXXPXACTGA

SEQ ID NO: 8039 - protein, 17 aa, Artificial Sequence
  Synthetically generated peptide
  VARIANT (1)..(17): Xaa = Any Amino Acid
CCELACNXXXPAXCTGA

SEQ ID NO: 8040 - protein, 17 aa, Artificial Sequence
  Synthetically generated peptide
  VARIANT (1)..(17): Xaa = Any Amino Acid
CCELACNXXXPACXTGA

SEQ ID NO: 8041 - protein, 17 aa, Artificial Sequence
  Synthetically generated peptide
  VARIANT (1)..(17): Xaa = Any Amino Acid
CCELACNXXXPACTXGA

SEQ ID NO: 8042 - protein, 17 aa, Artificial Sequence
  Synthetically generated peptide
  VARIANT (1)..(17): Xaa = Any Amino Acid
CCELACNXXXPACTGXA

SEQ ID NO: 8043 - protein, 16 aa, Artificial Sequence
  Synthetically generated peptide
  VARIANT (1)..(16): Xaa = Any Amino Acid
CCELACNXXPXACTGA

SEQ ID NO: 8044 - protein, 17 aa, Artificial Sequence
  Synthetically generated peptide
  VARIANT (1)..(17): Xaa = Any Amino Acid
CCELACNXXPXXACTGA

SEQ ID NO: 8045 - protein, 17 aa, Artificial Sequence
  Synthetically generated peptide
  VARIANT (1)..(17): Xaa = Any Amino Acid
CCELACNXXPXAXCTGA

SEQ ID NO: 8046 - protein, 17 aa, Artificial Sequence
  Synthetically generated peptide
  VARIANT (1)..(17): Xaa = Any Amino Acid
CCELACNXXPXACXTGA

SEQ ID NO: 8047 - protein, 17 aa, Artificial Sequence
  Synthetically generated peptide
  VARIANT (1)..(17): Xaa = Any Amino Acid
CCELACNXXPXACTXGA

SEQ ID NO: 8048 - protein, 17 aa, Artificial Sequence
  Synthetically generated peptide
  VARIANT (1)..(17): Xaa = Any Amino Acid
CCELACNXXPXACTGXA

SEQ ID NO: 8049 - protein, 16 aa, Artificial Sequence
  Synthetically generated peptide
  VARIANT (1)..(16): Xaa = Any Amino Acid
CCELACNXXPAXCTGA

SEQ ID NO: 8050 - protein, 17 aa, Artificial Sequence
  Synthetically generated peptide
  VARIANT (1)..(17): Xaa = Any Amino Acid
CCELACNXXPAXXCTGA

SEQ ID NO: 8051 - protein, 17 aa, Artificial Sequence
  Synthetically generated peptide
  VARIANT (1)..(17): Xaa = Any Amino Acid
CCELACNXXPAXCXTGA

SEQ ID NO: 8052 - protein, 17 aa, Artificial Sequence
  Synthetically generated peptide
  VARIANT (1)..(17): Xaa = Any Amino Acid
CCELACNXXPAXCTXGA

SEQ ID NO: 8053 - protein, 17 aa, Artificial Sequence
  Synthetically generated peptide
  VARIANT (1)..(17): Xaa = Any Amino Acid
CCELACNXXPAXCTGXA

SEQ ID NO: 8054 - protein, 16 aa, Artificial Sequence
  Synthetically generated peptide
  VARIANT (1)..(16): Xaa = Any Amino Acid
CCELACNXXPACXTGA

SEQ ID NO: 8055 - protein, 17 aa, Artificial Sequence
  Synthetically generated peptide
  VARIANT (1)..(17): Xaa = Any Amino Acid
CCELACNXXPACXXTGA

SEQ ID NO: 8056 - protein, 17 aa, Artificial Sequence
  Synthetically generated peptide
  VARIANT (1)..(17): Xaa = Any Amino Acid
CCELACNXXPACXTXGA

SEQ ID NO: 8057 - protein, 17 aa, Artificial Sequence
  Synthetically generated peptide
  VARIANT (1)..(17): Xaa = Any Amino Acid
CCELACNXXPACXTGXA

SEQ ID NO: 8058 - protein, 16 aa, Artificial Sequence
  Synthetically generated peptide
  VARIANT (1)..(16): Xaa = Any Amino Acid
CCELACNXXPACTXGA

SEQ ID NO: 8059 - protein, 17 aa, Artificial Sequence
  Synthetically generated peptide
  VARIANT (1)..(17): Xaa = Any Amino Acid
CCELACNXXPACTXXGA

SEQ ID NO: 8060 - protein, 17 aa, Artificial Sequence
  Synthetically generated peptide
  VARIANT (1)..(17): Xaa = Any Amino Acid
CCELACNXXPACTXGXA

SEQ ID NO: 8061 - protein, 16 aa, Artificial Sequence
  Synthetically generated peptide
  VARIANT (1)..(16): Xaa = Any Amino Acid
CCELACNXXPACTGXA

SEQ ID NO: 8062 - protein, 17 aa, Artificial Sequence
  Synthetically generated peptide
  VARIANT (1)..(17): Xaa = Any Amino Acid
CCELACNXXPACTGXXA

SEQ ID NO: 8063 - protein, 15 aa, Artificial Sequence
  Synthetically generated peptide
  VARIANT (1)..(15): Xaa = Any Amino Acid
CCELACNXPXACTGA

SEQ ID NO: 8064 - protein, 16 aa, Artificial Sequence
  Synthetically generated peptide
  VARIANT (1)..(16): Xaa = Any Amino Acid
CCELACNXPXXACTGA

SEQ ID NO: 8065 - protein, 17 aa, Artificial Sequence
  Synthetically generated peptide
  VARIANT (1)..(17): Xaa = Any Amino Acid
CCELACNXPXXXACTGA

SEQ ID NO: 8066 - protein, 17 aa, Artificial Sequence
  Synthetically generated peptide
  VARIANT (1)..(17): Xaa = Any Amino Acid
CCELACNXPXXAXCTGA

SEQ ID NO: 8067 - protein, 17 aa, Artificial Sequence
  Synthetically generated peptide
  VARIANT (1)..(17): Xaa = Any Amino Acid
CCELACNXPXXACXTGA

SEQ ID NO: 8068 - protein, 17 aa, Artificial Sequence
  Synthetically generated peptide
  VARIANT (1)..(17): Xaa = Any Amino Acid
CCELACNXPXXACTXGA

SEQ ID NO: 8069 - protein, 17 aa, Artificial Sequence
  Synthetically generated peptide
  VARIANT (1)..(17): Xaa = Any Amino Acid
CCELACNXPXXACTGXA

SEQ ID NO: 8070 - protein, 16 aa, Artificial Sequence
  Synthetically generated peptide
  VARIANT (1)..(16): Xaa = Any Amino Acid
CCELACNXPXAXCTGA

SEQ ID NO: 8071 - protein, 17 aa, Artificial Sequence
  Synthetically generated peptide
  VARIANT (1)..(17): Xaa = Any Amino Acid
CCELACNXPXAXXCTGA

SEQ ID NO: 8072 - protein, 17 aa, Artificial Sequence
  Synthetically generated peptide
  VARIANT (1)..(17): Xaa = Any Amino Acid
CCELACNXPXAXCXTGA

SEQ ID NO: 8073 - protein, 17 aa, Artificial Sequence
  Synthetically generated peptide
  VARIANT (1)..(17): Xaa = Any Amino Acid
CCELACNXPXAXCTXGA

SEQ ID NO: 8074 - protein, 17 aa, Artificial Sequence
  Synthetically generated peptide
  VARIANT (1)..(17): Xaa = Any Amino Acid
CCELACNXPXAXCTGXA

SEQ ID NO: 8075 - protein, 16 aa, Artificial Sequence
  Synthetically generated peptide
  VARIANT (1)..(16): Xaa = Any Amino Acid
CCELACNXPXACXTGA

SEQ ID NO: 8076 - protein, 17 aa, Artificial Sequence
  Synthetically generated peptide
  VARIANT (1)..(17): Xaa = Any Amino Acid
CCELACNXPXACXXTGA

SEQ ID NO: 8077 - protein, 17 aa, Artificial Sequence
  Synthetically generated peptide
  VARIANT (1)..(17): Xaa = Any Amino Acid
CCELACNXPXACXTXGA

SEQ ID NO: 8078 - protein, 17 aa, Artificial Sequence
  Synthetically generated peptide
  VARIANT (1)..(17): Xaa = Any Amino Acid
CCELACNXPXACXTGXA

SEQ ID NO: 8079 - protein, 16 aa, Artificial Sequence
  Synthetically generated peptide
  VARIANT (1)..(16): Xaa = Any Amino Acid
CCELACNXPXACTXGA

SEQ ID NO: 8080 - protein, 17 aa, Artificial Sequence
  Synthetically generated peptide
  VARIANT (1)..(17): Xaa = Any Amino Acid
CCELACNXPXACTXXGA

SEQ ID NO: 8081 - protein, 17 aa, Artificial Sequence
  Synthetically generated peptide
  VARIANT (1)..(17): Xaa = Any Amino Acid
CCELACNXPXACTXGXA

SEQ ID NO: 8082 - protein, 16 aa, Artificial Sequence
  Synthetically generated peptide
  VARIANT (1)..(16): Xaa = Any Amino Acid
CCELACNXPXACTGXA

SEQ ID NO: 8083 - protein, 17 aa, Artificial Sequence
  Synthetically generated peptide
  VARIANT (1)..(17): Xaa = Any Amino Acid
CCELACNXPXACTGXXA

SEQ ID NO: 8084 - protein, 15 aa, Artificial Sequence
  Synthetically generated peptide
  VARIANT (1)..(15): Xaa = Any Amino Acid
CCELACNXPAXCTGA

SEQ ID NO: 8085 - protein, 16 aa, Artificial Sequence
  Synthetically generated peptide
  VARIANT (1)..(16): Xaa = Any Amino Acid
CCELACNXPAXXCTGA

SEQ ID NO: 8086 - protein, 17 aa, Artificial Sequence
  Synthetically generated peptide
  VARIANT (1)..(17): Xaa = Any Amino Acid
CCELACNXPAXXXCTGA

SEQ ID NO: 8087 - protein, 17 aa, Artificial Sequence
  Synthetically generated peptide
  VARIANT (1)..(17): Xaa = Any Amino Acid
CCELACNXPAXXCXTGA

SEQ ID NO: 8088 - protein, 17 aa, Artificial Sequence
  Synthetically generated peptide
  VARIANT (1)..(17): Xaa = Any Amino Acid
CCELACNXPAXXCTXGA

SEQ ID NO: 8089 - protein, 17 aa, Artificial Sequence
  Synthetically generated peptide
  VARIANT (1)..(17): Xaa = Any Amino Acid
CCELACNXPAXXCTGXA

SEQ ID NO: 8090 - protein, 16 aa, Artificial Sequence
  Synthetically generated peptide
  VARIANT (1)..(16): Xaa = Any Amino Acid
CCELACNXPAXCXTGA

SEQ ID NO: 8091 - protein, 17 aa, Artificial Sequence
  Synthetically generated peptide
  VARIANT (1)..(17): Xaa = Any Amino Acid
CCELACNXPAXCXXTGA

SEQ ID NO: 8092 - protein, 17 aa, Artificial Sequence
  Synthetically generated peptide
  VARIANT (1)..(17): Xaa = Any Amino Acid
CCELACNXPAXCXTXGA

SEQ ID NO: 8093 - protein, 17 aa, Artificial Sequence
  Synthetically generated peptide
  VARIANT (1)..(17): Xaa = Any Amino Acid
CCELACNXPAXCXTGXA

SEQ ID NO: 8094 - protein, 16 aa, Artificial Sequence
  Synthetically generated peptide
  VARIANT (1)..(16): Xaa = Any Amino Acid
CCELACNXPAXCTXGA

SEQ ID NO: 8095 - protein, 17 aa, Artificial Sequence
  Synthetically generated peptide
  VARIANT (1)..(17): Xaa = Any Amino Acid
CCELACNXPAXCTXXGA

SEQ ID NO: 8096 - protein, 17 aa, Artificial Sequence
  Synthetically generated peptide
  VARIANT (1)..(17): Xaa = Any Amino Acid
CCELACNXPAXCTXGXA

SEQ ID NO: 8097 - protein, 16 aa, Artificial Sequence
  Synthetically generated peptide
  VARIANT (1)..(16): Xaa = Any Amino Acid
CCELACNXPAXCTGXA

SEQ ID NO: 8098 - protein, 17 aa, Artificial Sequence
  Synthetically generated peptide
  VARIANT (1)..(17): Xaa = Any Amino Acid
CCELACNXPAXCTGXXA

SEQ ID NO: 8099 - protein, 15 aa, Artificial Sequence
  Synthetically generated peptide
  VARIANT (1)..(15): Xaa = Any Amino Acid
CCELACNXPACXTGA

SEQ ID NO: 8100 - protein, 16 aa, Artificial Sequence
  Synthetically generated peptide
  VARIANT (1)..(16): Xaa = Any Amino Acid
CCELACNXPACXXTGA

SEQ ID NO: 8101 - protein, 17 aa, Artificial Sequence
  Synthetically generated peptide
  VARIANT (1)..(17): Xaa = Any Amino Acid
CCELACNXPACXXXTGA

SEQ ID NO: 8102 - protein, 17 aa, Artificial Sequence
  Synthetically generated peptide
  VARIANT (1)..(17): Xaa = Any Amino Acid
CCELACNXPACXXTXGA

SEQ ID NO: 8103 - protein, 17 aa, Artificial Sequence
  Synthetically generated peptide
  VARIANT (1)..(17): Xaa = Any Amino Acid
CCELACNXPACXXTGXA

SEQ ID NO: 8104 - protein, 16 aa, Artificial Sequence
  Synthetically generated peptide
  VARIANT (1)..(16): Xaa = Any Amino Acid
CCELACNXPACXTXGA

SEQ ID NO: 8105 - protein, 17 aa, Artificial Sequence
  Synthetically generated peptide
  VARIANT (1)..(17): Xaa = Any Amino Acid
CCELACNXPACXTXXGA

SEQ ID NO: 8106 - protein, 17 aa, Artificial Sequence
  Synthetically generated peptide
  VARIANT (1)..(17): Xaa = Any Amino Acid
CCELACNXPACXTXGXA

SEQ ID NO: 8107 - protein, 16 aa, Artificial Sequence
  Synthetically generated peptide
  VARIANT (1)..(16): Xaa = Any Amino Acid
CCELACNXPACXTGXA

SEQ ID NO: 8108 - protein, 17 aa, Artificial Sequence
  Synthetically generated peptide
  VARIANT (1)..(17): Xaa = Any Amino Acid
CCELACNXPACXTGXXA

SEQ ID NO: 8109 - protein, 15 aa, Artificial Sequence
  Synthetically generated peptide
  VARIANT (1)..(15): Xaa = Any Amino Acid
CCELACNXPACTXGA

SEQ ID NO: 8110 - protein, 16 aa, Artificial Sequence
  Synthetically generated peptide
  VARIANT (1)..(16): Xaa = Any Amino Acid
CCELACNXPACTXXGA

SEQ ID NO: 8111 - protein, 17 aa, Artificial Sequence
  Synthetically generated peptide
  VARIANT (1)..(17): Xaa = Any Amino Acid
CCELACNXPACTXXXGA

SEQ ID NO: 8112 - protein, 17 aa, Artificial Sequence
  Synthetically generated peptide
  VARIANT (1)..(17): Xaa = Any Amino Acid
CCELACNXPACTXXGXA

SEQ ID NO: 8113 - protein, 16 aa, Artificial Sequence
  Synthetically generated peptide
  VARIANT (1)..(16): Xaa = Any Amino Acid
CCELACNXPACTXGXA

SEQ ID NO: 8114 - protein, 17 aa, Artificial Sequence
  Synthetically generated peptide
  VARIANT (1)..(17): Xaa = Any Amino Acid
CCELACNXPACTXGXXA

SEQ ID NO: 8115 - protein, 15 aa, Artificial Sequence
  Synthetically generated peptide
  VARIANT (1)..(15): Xaa = Any Amino Acid
CCELACNXPACTGXA

SEQ ID NO: 8116 - protein, 16 aa, Artificial Sequence
  Synthetically generated peptide
  VARIANT (1)..(16): Xaa = Any Amino Acid
CCELACNXPACTGXXA

SEQ ID NO: 8117 - protein, 17 aa, Artificial Sequence
  Synthetically generated peptide
  VARIANT (1)..(17): Xaa = Any Amino Acid
CCELACNXPACTGXXXA

SEQ ID NO: 8118 - protein, 14 aa, Artificial Sequence
  Synthetically generated peptide
  VARIANT (1)..(14): Xaa = Any Amino Acid
CCELACNPXACTGA

SEQ ID NO: 8119 - protein, 15 aa, Artificial Sequence
  Synthetically generated peptide
  VARIANT (1)..(15): Xaa = Any Amino Acid
CCELACNPXXACTGA

SEQ ID NO: 8120 - protein, 16 aa, Artificial Sequence
  Synthetically generated peptide
  VARIANT (1)..(16): Xaa = Any Amino Acid
CCELACNPXXXACTGA

SEQ ID NO: 8121 - protein, 17 aa, Artificial Sequence
  Synthetically generated peptide
  VARIANT (1)..(17): Xaa = Any Amino Acid
CCELACNPXXXXACTGA

SEQ ID NO: 8122 - protein, 17 aa, Artificial Sequence
  Synthetically generated peptide
  VARIANT (1)..(17): Xaa = Any Amino Acid
CCELACNPXXXAXCTGA

SEQ ID NO: 8123 - protein, 17 aa, Artificial Sequence
  Synthetically generated peptide
  VARIANT (1)..(17): Xaa = Any Amino Acid
CCELACNPXXXACXTGA

SEQ ID NO: 8124 - protein, 17 aa, Artificial Sequence
  Synthetically generated peptide
  VARIANT (1)..(17): Xaa = Any Amino Acid
CCELACNPXXXACTXGA

SEQ ID NO: 8125 - protein, 17 aa, Artificial Sequence
  Synthetically generated peptide
  VARIANT (1)..(17): Xaa = Any Amino Acid
CCELACNPXXXACTGXA

SEQ ID NO: 8126 - protein, 16 aa, Artificial Sequence
  Synthetically generated peptide
  VARIANT (1)..(16): Xaa = Any Amino Acid
CCELACNPXXAXCTGA

SEQ ID NO: 8127 - protein, 17 aa, Artificial Sequence
  Synthetically generated peptide
  VARIANT (1)..(17): Xaa = Any Amino Acid
CCELACNPXXAXXCTGA

SEQ ID NO: 8128 - protein, 17 aa, Artificial Sequence
  Synthetically generated peptide
  VARIANT (1)..(17): Xaa = Any Amino Acid
CCELACNPXXAXCXTGA

SEQ ID NO: 8129 - protein, 17 aa, Artificial Sequence
  Synthetically generated peptide
  VARIANT (1)..(17): Xaa = Any Amino Acid
CCELACNPXXAXCTXGA

SEQ ID NO: 8130 - protein, 17 aa, Artificial Sequence
  Synthetically generated peptide
  VARIANT (1)..(17): Xaa = Any Amino Acid
CCELACNPXXAXCTGXA

SEQ ID NO: 8131 - protein, 16 aa, Artificial Sequence
  Synthetically generated peptide
  VARIANT (1)..(16): Xaa = Any Amino Acid
CCELACNPXXACXTGA

SEQ ID NO: 8132 - protein, 17 aa, Artificial Sequence
  Synthetically generated peptide
  VARIANT (1)..(17): Xaa = Any Amino Acid
CCELACNPXXACXXTGA

SEQ ID NO: 8133 - protein, 17 aa, Artificial Sequence
  Synthetically generated peptide
  VARIANT (1)..(17): Xaa = Any Amino Acid
CCELACNPXXACXTXGA

SEQ ID NO: 8134 - protein, 17 aa, Artificial Sequence
  Synthetically generated peptide
  VARIANT (1)..(17): Xaa = Any Amino Acid
CCELACNPXXACXTGXA

SEQ ID NO: 8135 - protein, 16 aa, Artificial Sequence
  Synthetically generated peptide
  VARIANT (1)..(16): Xaa = Any Amino Acid
CCELACNPXXACTXGA

SEQ ID NO: 8136 - protein, 17 aa, Artificial Sequence
  Synthetically generated peptide
  VARIANT (1)..(17): Xaa = Any Amino Acid
CCELACNPXXACTXXGA

SEQ ID NO: 8137 - protein, 17 aa, Artificial Sequence
  Synthetically generated peptide
  VARIANT (1)..(17): Xaa = Any Amino Acid
CCELACNPXXACTXGXA

SEQ ID NO: 8138 - protein, 16 aa, Artificial Sequence
  Synthetically generated peptide
  VARIANT (1)..(16): Xaa = Any Amino Acid
CCELACNPXXACTGXA

SEQ ID NO: 8139 - protein, 17 aa, Artificial Sequence
  Synthetically generated peptide
  VARIANT (1)..(17): Xaa = Any Amino Acid
CCELACNPXXACTGXXA

SEQ ID NO: 8140 - protein, 15 aa, Artificial Sequence
  Synthetically generated peptide
  VARIANT (1)..(15): Xaa = Any Amino Acid
CCELACNPXAXCTGA

SEQ ID NO: 8141 - protein, 16 aa, Artificial Sequence
  Synthetically generated peptide
  VARIANT (1)..(16): Xaa = Any Amino Acid
CCELACNPXAXXCTGA

SEQ ID NO: 8142 - protein, 17 aa, Artificial Sequence
  Synthetically generated peptide
  VARIANT (1)..(17): Xaa = Any Amino Acid
CCELACNPXAXXXCTGA

SEQ ID NO: 8143 - protein, 17 aa, Artificial Sequence
  Synthetically generated peptide
  VARIANT (1)..(17): Xaa = Any Amino Acid
CCELACNPXAXXCXTGA

SEQ ID NO: 8144 - protein, 17 aa, Artificial Sequence
  Synthetically generated peptide
  VARIANT (1)..(17): Xaa = Any Amino Acid
CCELACNPXAXXCTXGA

SEQ ID NO: 8145 - protein, 17 aa, Artificial Sequence
  Synthetically generated peptide
  VARIANT (1)..(17): Xaa = Any Amino Acid
CCELACNPXAXXCTGXA

SEQ ID NO: 8146 - protein, 16 aa, Artificial Sequence
  Synthetically generated peptide
  VARIANT (1)..(16): Xaa = Any Amino Acid
CCELACNPXAXCXTGA

SEQ ID NO: 8147 - protein, 17 aa, Artificial Sequence
  Synthetically generated peptide
  VARIANT (1)..(17): Xaa = Any Amino Acid
CCELACNPXAXCXXTGA

SEQ ID NO: 8148 - protein, 17 aa, Artificial Sequence
  Synthetically generated peptide
  VARIANT (1)..(17): Xaa = Any Amino Acid
CCELACNPXAXCXTXGA

SEQ ID NO: 8149 - protein, 17 aa, Artificial Sequence
  Synthetically generated peptide
  VARIANT (1)..(17): Xaa = Any Amino Acid
CCELACNPXAXCXTGXA

SEQ ID NO: 8150 - protein, 16 aa, Artificial Sequence
  Synthetically generated peptide
  VARIANT (1)..(16): Xaa = Any Amino Acid
CCELACNPXAXCTXGA

SEQ ID NO: 8151 - protein, 17 aa, Artificial Sequence
  Synthetically generated peptide
  VARIANT (1)..(17): Xaa = Any Amino Acid
CCELACNPXAXCTXXGA

SEQ ID NO: 8152 - protein, 17 aa, Artificial Sequence
  Synthetically generated peptide
  VARIANT (1)..(17): Xaa = Any Amino Acid
CCELACNPXAXCTXGXA

SEQ ID NO: 8153 - protein, 16 aa, Artificial Sequence
  Synthetically generated peptide
  VARIANT (1)..(16): Xaa = Any Amino Acid
CCELACNPXAXCTGXA

SEQ ID NO: 8154 - protein, 17 aa, Artificial Sequence
  Synthetically generated peptide
  VARIANT (1)..(17): Xaa = Any Amino Acid
CCELACNPXAXCTGXXA

SEQ ID NO: 8155 - protein, 15 aa, Artificial Sequence
  Synthetically generated peptide
  VARIANT (1)..(15): Xaa = Any Amino Acid
CCELACNPXACXTGA

SEQ ID NO: 8156 - protein, 16 aa, Artificial Sequence
  Synthetically generated peptide
  VARIANT (1)..(16): Xaa = Any Amino Acid
CCELACNPXACXXTGA

SEQ ID NO: 8157 - protein, 17 aa, Artificial Sequence
  Synthetically generated peptide
  VARIANT (1)..(17): Xaa = Any Amino Acid
CCELACNPXACXXXTGA

SEQ ID NO: 8158 - protein, 17 aa, Artificial Sequence
  Synthetically generated peptide
  VARIANT (1)..(17): Xaa = Any Amino Acid
CCELACNPXACXXTXGA

SEQ ID NO: 8159 - protein, 17 aa, Artificial Sequence
  Synthetically generated peptide
  VARIANT (1)..(17): Xaa = Any Amino Acid
CCELACNPXACXXTGXA

SEQ ID NO: 8160 - protein, 16 aa, Artificial Sequence
  Synthetically generated peptide
  VARIANT (1)..(16): Xaa = Any Amino Acid
CCELACNPXACXTXGA

SEQ ID NO: 8161 - protein, 17 aa, Artificial Sequence
  Synthetically generated peptide
  VARIANT (1)..(17): Xaa = Any Amino Acid
CCELACNPXACXTXXGA

SEQ ID NO: 8162 - protein, 17 aa, Artificial Sequence
  Synthetically generated peptide
  VARIANT (1)..(17): Xaa = Any Amino Acid
CCELACNPXACXTXGXA

SEQ ID NO: 8163 - protein, 16 aa, Artificial Sequence
  Synthetically generated peptide
  VARIANT (1)..(16): Xaa = Any Amino Acid
CCELACNPXACXTGXA

SEQ ID NO: 8164 - protein, 17 aa, Artificial Sequence
  Synthetically generated peptide
  VARIANT (1)..(17): Xaa = Any Amino Acid
CCELACNPXACXTGXXA

SEQ ID NO: 8165 - protein, 15 aa, Artificial Sequence
  Synthetically generated peptide
  VARIANT (1)..(15): Xaa = Any Amino Acid
CCELACNPXACTXGA

SEQ ID NO: 8166 - protein, 16 aa, Artificial Sequence
  Synthetically generated peptide
  VARIANT (1)..(16): Xaa = Any Amino Acid
CCELACNPXACTXXGA

SEQ ID NO: 8167 - protein, 17 aa, Artificial Sequence
  Synthetically generated peptide
  VARIANT (1)..(17): Xaa = Any Amino Acid
CCELACNPXACTXXXGA

SEQ ID NO: 8168 - protein, 17 aa, Artificial Sequence
  Synthetically generated peptide
  VARIANT (1)..(17): Xaa = Any Amino Acid
CCELACNPXACTXXGXA

SEQ ID NO: 8169 - protein, 16 aa, Artificial Sequence
  Synthetically generated peptide
  VARIANT (1)..(16): Xaa = Any Amino Acid
CCELACNPXACTXGXA

SEQ ID NO: 8170 - protein, 17 aa, Artificial Sequence
  Synthetically generated peptide
  VARIANT (1)..(17): Xaa = Any Amino Acid
CCELACNPXACTXGXXA

SEQ ID NO: 8171 - protein, 15 aa, Artificial Sequence
  Synthetically generated peptide
  VARIANT (1)..(15): Xaa = Any Amino Acid
CCELACNPXACTGXA

SEQ ID NO: 8172 - protein, 16 aa, Artificial Sequence
  Synthetically generated peptide
  VARIANT (1)..(16): Xaa = Any Amino Acid
CCELACNPXACTGXXA

SEQ ID NO: 8173 - protein, 17 aa, Artificial Sequence
  Synthetically generated peptide
  VARIANT (1)..(17): Xaa = Any Amino Acid
CCELACNPXACTGXXXA

SEQ ID NO: 8174 - protein, 14 aa, Artificial Sequence
  Synthetically generated peptide
  VARIANT (1)..(14): Xaa = Any Amino Acid
CCELACNPAXCTGA

SEQ ID NO: 8175 - protein, 15 aa, Artificial Sequence
  Synthetically generated peptide
  VARIANT (1)..(15): Xaa = Any Amino Acid
CCELACNPAXXCTGA

SEQ ID NO: 8176 - protein, 16 aa, Artificial Sequence
  Synthetically generated peptide
  VARIANT (1)..(16): Xaa = Any Amino Acid
CCELACNPAXXXCTGA

SEQ ID NO: 8177 - protein, 17 aa, Artificial Sequence
  Synthetically generated peptide
  VARIANT (1)..(17): Xaa = Any Amino Acid
CCELACNPAXXXXCTGA

SEQ ID NO: 8178 - protein, 17 aa, Artificial Sequence
  Synthetically generated peptide
  VARIANT (1)..(17): Xaa = Any Amino Acid
CCELACNPAXXXCXTGA

SEQ ID NO: 8179 - protein, 17 aa, Artificial Sequence
  Synthetically generated peptide
  VARIANT (1)..(17): Xaa = Any Amino Acid
CCELACNPAXXXCTXGA

SEQ ID NO: 8180 - protein, 17 aa, Artificial Sequence
  Synthetically generated peptide
  VARIANT (1)..(17): Xaa = Any Amino Acid
CCELACNPAXXXCTGXA

SEQ ID NO: 8181 - protein, 16 aa, Artificial Sequence
  Synthetically generated peptide
  VARIANT (1)..(16): Xaa = Any Amino Acid
CCELACNPAXXCXTGA

SEQ ID NO: 8182 - protein, 17 aa, Artificial Sequence
  Synthetically generated peptide
  VARIANT (1)..(17): Xaa = Any Amino Acid
CCELACNPAXXCXXTGA

SEQ ID NO: 8183 - protein, 17 aa, Artificial Sequence
  Synthetically generated peptide
  VARIANT (1)..(17): Xaa = Any Amino Acid
CCELACNPAXXCXTXGA

SEQ ID NO: 8184 - protein, 17 aa, Artificial Sequence
  Synthetically generated peptide
  VARIANT (1)..(17): Xaa = Any Amino Acid
CCELACNPAXXCXTGXA

SEQ ID NO: 8185 - protein, 16 aa, Artificial Sequence
  Synthetically generated peptide
  VARIANT (1)..(16): Xaa = Any Amino Acid
CCELACNPAXXCTXGA

SEQ ID NO: 8186 - protein, 17 aa, Artificial Sequence
  Synthetically generated peptide
  VARIANT (1)..(17): Xaa = Any Amino Acid
CCELACNPAXXCTXXGA

SEQ ID NO: 8187 - protein, 17 aa, Artificial Sequence
  Synthetically generated peptide
  VARIANT (1)..(17): Xaa = Any Amino Acid
CCELACNPAXXCTXGXA

SEQ ID NO: 8188 - protein, 16 aa, Artificial Sequence
  Synthetically generated peptide
  VARIANT (1)..(16): Xaa = Any Amino Acid
CCELACNPAXXCTGXA

SEQ ID NO: 8189 - protein, 17 aa, Artificial Sequence
  Synthetically generated peptide
  VARIANT (1)..(17): Xaa = Any Amino Acid
CCELACNPAXXCTGXXA

SEQ ID NO: 8190 - protein, 15 aa, Artificial Sequence
  Synthetically generated peptide
  VARIANT (1)..(15): Xaa = Any Amino Acid
CCELACNPAXCXTGA

SEQ ID NO: 8191 - protein, 16 aa, Artificial Sequence
  Synthetically generated peptide
  VARIANT (1)..(16): Xaa = Any Amino Acid
CCELACNPAXCXXTGA

SEQ ID NO: 8192 - protein, 17 aa, Artificial Sequence
  Synthetically generated peptide
  VARIANT (1)..(17): Xaa = Any Amino Acid
CCELACNPAXCXXXTGA

SEQ ID NO: 8193 - protein, 17 aa, Artificial Sequence
  Synthetically generated peptide
  VARIANT (1)..(17): Xaa = Any Amino Acid
CCELACNPAXCXXTXGA

SEQ ID NO: 8194 - protein, 17 aa, Artificial Sequence
  Synthetically generated peptide
  VARIANT (1)..(17): Xaa = Any Amino Acid
CCELACNPAXCXXTGXA

SEQ ID NO: 8195 - protein, 16 aa, Artificial Sequence
  Synthetically generated peptide
  VARIANT (1)..(16): Xaa = Any Amino Acid
CCELACNPAXCXTXGA

SEQ ID NO: 8196 - protein, 17 aa, Artificial Sequence
  Synthetically generated peptide
  VARIANT (1)..(17): Xaa = Any Amino Acid
CCELACNPAXCXTXXGA

SEQ ID NO: 8197 - protein, 17 aa, Artificial Sequence
  Synthetically generated peptide
  VARIANT (1)..(17): Xaa = Any Amino Acid
CCELACNPAXCXTXGXA

SEQ ID NO: 8198 - protein, 16 aa, Artificial Sequence
  Synthetically generated peptide
  VARIANT (1)..(16): Xaa = Any Amino Acid
CCELACNPAXCXTGXA

SEQ ID NO: 8199 - protein, 17 aa, Artificial Sequence
  Synthetically generated peptide
  VARIANT (1)..(17): Xaa = Any Amino Acid
CCELACNPAXCXTGXXA

SEQ ID NO: 8200 - protein, 15 aa, Artificial Sequence
  Synthetically generated peptide
  VARIANT (1)..(15): Xaa = Any Amino Acid
CCELACNPAXCTXGA

SEQ ID NO: 8201 - protein, 16 aa, Artificial Sequence
  Synthetically generated peptide
  VARIANT (1)..(16): Xaa = Any Amino Acid
CCELACNPAXCTXXGA

SEQ ID NO: 8202 - protein, 17 aa, Artificial Sequence
  Synthetically generated peptide
  VARIANT (1)..(17): Xaa = Any Amino Acid
CCELACNPAXCTXXXGA

SEQ ID NO: 8203 - protein, 17 aa, Artificial Sequence
  Synthetically generated peptide
  VARIANT (1)..(17): Xaa = Any Amino Acid
CCELACNPAXCTXXGXA

SEQ ID NO: 8204 - protein, 16 aa, Artificial Sequence
  Synthetically generated peptide
  VARIANT (1)..(16): Xaa = Any Amino Acid
CCELACNPAXCTXGXA

SEQ ID NO: 8205 - protein, 17 aa, Artificial Sequence
  Synthetically generated peptide
  VARIANT (1)..(17): Xaa = Any Amino Acid
CCELACNPAXCTXGXXA

SEQ ID NO: 8206 - protein, 15 aa, Artificial Sequence
  Synthetically generated peptide
  VARIANT (1)..(15): Xaa = Any Amino Acid
CCELACNPAXCTGXA

SEQ ID NO: 8207 - protein, 16 aa, Artificial Sequence
  Synthetically generated peptide
  VARIANT (1)..(16): Xaa = Any Amino Acid
CCELACNPAXCTGXXA

SEQ ID NO: 8208 - protein, 17 aa, Artificial Sequence
  Synthetically generated peptide
  VARIANT (1)..(17): Xaa = Any Amino Acid
CCELACNPAXCTGXXXA

SEQ ID NO: 8209 - protein, 14 aa, Artificial Sequence
  Synthetically generated peptide
  VARIANT (1)..(14): Xaa = Any Amino Acid
CCELACNPACXTGA

SEQ ID NO: 8210 - protein, 15 aa, Artificial Sequence
  Synthetically generated peptide
  VARIANT (1)..(15): Xaa = Any Amino Acid
CCELACNPACXXTGA

SEQ ID NO: 8211 - protein, 16 aa, Artificial Sequence
  Synthetically generated peptide
  VARIANT (1)..(16): Xaa = Any Amino Acid
CCELACNPACXXXTGA

SEQ ID NO: 8212 - protein, 17 aa, Artificial Sequence
  Synthetically generated peptide
  VARIANT (1)..(17): Xaa = Any Amino Acid
CCELACNPACXXXXTGA

SEQ ID NO: 8213 - protein, 17 aa, Artificial Sequence
  Synthetically generated peptide
  VARIANT (1)..(17): Xaa = Any Amino Acid
CCELACNPACXXXTXGA

SEQ ID NO: 8214 - protein, 17 aa, Artificial Sequence
  Synthetically generated peptide
  VARIANT (1)..(17): Xaa = Any Amino Acid
CCELACNPACXXXTGXA

SEQ ID NO: 8215 - protein, 16 aa, Artificial Sequence
  Synthetically generated peptide
  VARIANT (1)..(16): Xaa = Any Amino Acid
CCELACNPACXXTXGA

SEQ ID NO: 8216 - protein, 17 aa, Artificial Sequence
  Synthetically generated peptide
  VARIANT (1)..(17): Xaa = Any Amino Acid
CCELACNPACXXTXXGA

SEQ ID NO: 8217 - protein, 17 aa, Artificial Sequence
  Synthetically generated peptide
  VARIANT (1)..(17): Xaa = Any Amino Acid
CCELACNPACXXTXGXA

SEQ ID NO: 8218 - protein, 16 aa, Artificial Sequence
  Synthetically generated peptide
  VARIANT (1)..(16): Xaa = Any Amino Acid
CCELACNPACXXTGXA

SEQ ID NO: 8219 - protein, 17 aa, Artificial Sequence
  Synthetically generated peptide
  VARIANT (1)..(17): Xaa = Any Amino Acid
CCELACNPACXXTGXXA

SEQ ID NO: 8220 - protein, 15 aa, Artificial Sequence
  Synthetically generated peptide
  VARIANT (1)..(15): Xaa = Any Amino Acid
CCELACNPACXTXGA

SEQ ID NO: 8221 - protein, 16 aa, Artificial Sequence
  Synthetically generated peptide
  VARIANT (1)..(16): Xaa = Any Amino Acid
CCELACNPACXTXXGA

SEQ ID NO: 8222 - protein, 17 aa, Artificial Sequence
  Synthetically generated peptide
  VARIANT (1)..(17): Xaa = Any Amino Acid
CCELACNPACXTXXXGA

SEQ ID NO: 8223 - protein, 17 aa, Artificial Sequence
  Synthetically generated peptide
  VARIANT (1)..(17): Xaa = Any Amino Acid
CCELACNPACXTXXGXA

SEQ ID NO: 8224 - protein, 16 aa, Artificial Sequence
  Synthetically generated peptide
  VARIANT (1)..(16): Xaa = Any Amino Acid
CCELACNPACXTXGXA

SEQ ID NO: 8225 - protein, 17 aa, Artificial Sequence
  Synthetically generated peptide
  VARIANT (1)..(17): Xaa = Any Amino Acid
CCELACNPACXTXGXXA

SEQ ID NO: 8226 - protein, 15 aa, Artificial Sequence
  Synthetically generated peptide
  VARIANT (1)..(15): Xaa = Any Amino Acid
CCELACNPACXTGXA

SEQ ID NO: 8227 - protein, 16 aa, Artificial Sequence
  Synthetically generated peptide
  VARIANT (1)..(16): Xaa = Any Amino Acid
CCELACNPACXTGXXA

SEQ ID NO: 8228 - protein, 17 aa, Artificial Sequence
  Synthetically generated peptide
  VARIANT (1)..(17): Xaa = Any Amino Acid
CCELACNPACXTGXXXA

SEQ ID NO: 8229 - protein, 14 aa, Artificial Sequence
  Synthetically generated peptide
  VARIANT (1)..(14): Xaa = Any Amino Acid
CCELACNPACTXGA

SEQ ID NO: 8230 - protein, 15 aa, Artificial Sequence
  Synthetically generated peptide
  VARIANT (1)..(15): Xaa = Any Amino Acid
CCELACNPACTXXGA

SEQ ID NO: 8231 - protein, 16 aa, Artificial Sequence
  Synthetically generated peptide
  VARIANT (1)..(16): Xaa = Any Amino Acid
CCELACNPACTXXXGA

SEQ ID NO: 8232 - protein, 17 aa, Artificial Sequence
  Synthetically generated peptide
  VARIANT (1)..(17): Xaa = Any Amino Acid
CCELACNPACTXXXXGA

SEQ ID NO: 8233 - protein, 17 aa, Artificial Sequence
  Synthetically generated peptide
  VARIANT (1)..(17): Xaa = Any Amino Acid
CCELACNPACTXXXGXA

SEQ ID NO: 8234 - protein, 16 aa, Artificial Sequence
  Synthetically generated peptide
  VARIANT (1)..(16): Xaa = Any Amino Acid
CCELACNPACTXXGXA

SEQ ID NO: 8235 - protein, 17 aa, Artificial Sequence
  Synthetically generated peptide
  VARIANT (1)..(17): Xaa = Any Amino Acid
CCELACNPACTXXGXXA

SEQ ID NO: 8236 - protein, 15 aa, Artificial Sequence
  Synthetically generated peptide
  VARIANT (1)..(15): Xaa = Any Amino Acid
CCELACNPACTXGXA

SEQ ID NO: 8237 - protein, 16 aa, Artificial Sequence
  Synthetically generated peptide
  VARIANT (1)..(16): Xaa = Any Amino Acid
CCELACNPACTXGXXA

SEQ ID NO: 8238 - protein, 17 aa, Artificial Sequence
  Synthetically generated peptide
  VARIANT (1)..(17): Xaa = Any Amino Acid
CCELACNPACTXGXXXA

SEQ ID NO: 8239 - protein, 14 aa, Artificial Sequence
  Synthetically generated peptide
  VARIANT (1)..(14): Xaa = Any Amino Acid
CCELACNPACTGXA

SEQ ID NO: 8240 - protein, 15 aa, Artificial Sequence
  Synthetically generated peptide
  VARIANT (1)..(15): Xaa = Any Amino Acid
CCELACNPACTGXXA

SEQ ID NO: 8241 - protein, 16 aa, Artificial Sequence
  Synthetically generated peptide
  VARIANT (1)..(16): Xaa = Any Amino Acid
CCELACNPACTGXXXA

SEQ ID NO: 8242 - protein, 17 aa, Artificial Sequence
  Synthetically generated peptide
  VARIANT (1)..(17): Xaa = Any Amino Acid
CCELACNPACTGXXXXA

SEQ ID NO: 8243 - protein, 14 aa, Artificial Sequence
  Synthetically generated peptide
  VARIANT (1)..(14): Xaa = Any Amino Acid
ACXEYCANPACTGC

SEQ ID NO: 8244 - protein, 15 aa, Artificial Sequence
  Synthetically generated peptide
  VARIANT (1)..(15): Xaa = Any Amino Acid
ACXXEYCANPACTGC

SEQ ID NO: 8245 - protein, 16 aa, Artificial Sequence
  Synthetically generated peptide
  VARIANT (1)..(16): Xaa = Any Amino Acid
ACXXXEYCANPACTGC

SEQ ID NO: 8246 - protein, 17 aa, Artificial Sequence
  Synthetically generated peptide
  VARIANT (1)..(17): Xaa = Any Amino Acid
ACXXXXEYCANPACTGC

SEQ ID NO: 8247 - protein, 17 aa, Artificial Sequence
  Synthetically generated peptide
  VARIANT (1)..(17): Xaa = Any Amino Acid
ACXXXEXYCANPACTGC

SEQ ID NO: 8248 - protein, 17 aa, Artificial Sequence
  Synthetically generated peptide
  VARIANT (1)..(17): Xaa = Any Amino Acid
ACXXXEYXCANPACTGC

SEQ ID NO: 8249 - protein, 17 aa, Artificial Sequence
  Synthetically generated peptide
  VARIANT (1)..(17): Xaa = Any Amino Acid
ACXXXEYCAXNPACTGC

SEQ ID NO: 8250 - protein, 17 aa, Artificial Sequence
  Synthetically generated peptide
  VARIANT (1)..(17): Xaa = Any Amino Acid
ACXXXEYCANXPACTGC

SEQ ID NO: 8251 - protein, 17 aa, Artificial Sequence
  Synthetically generated peptide
  VARIANT (1)..(17): Xaa = Any Amino Acid
ACXXXEYCANPXACTGC

SEQ ID NO: 8252 - protein, 17 aa, Artificial Sequence
  Synthetically generated peptide
  VARIANT (1)..(17): Xaa = Any Amino Acid
ACXXXEYCANPAXCTGC

SEQ ID NO: 8253 - protein, 17 aa, Artificial Sequence
  Synthetically generated peptide
  VARIANT (1)..(17): Xaa = Any Amino Acid
ACXXXEYCANPACXTGC

SEQ ID NO: 8254 - protein, 17 aa, Artificial Sequence
  Synthetically generated peptide
  VARIANT (1)..(17): Xaa = Any Amino Acid
ACXXXEYCANPACTXGC

SEQ ID NO: 8255 - protein, 17 aa, Artificial Sequence
  Synthetically generated peptide
  VARIANT (1)..(17): Xaa = Any Amino Acid
ACXXXEYCANPACTGXC

SEQ ID NO: 8256 - protein, 16 aa, Artificial Sequence
  Synthetically generated peptide
  VARIANT (1)..(16): Xaa = Any Amino Acid
ACXXEXYCANPACTGC

SEQ ID NO: 8257 - protein, 17 aa, Artificial Sequence
  Synthetically generated peptide
  VARIANT (1)..(17): Xaa = Any Amino Acid
ACXXEXXYCANPACTGC

SEQ ID NO: 8258 - protein, 17 aa, Artificial Sequence
  Synthetically generated peptide
  VARIANT (1)..(17): Xaa = Any Amino Acid
ACXXEXYXCANPACTGC

SEQ ID NO: 8259 - protein, 17 aa, Artificial Sequence
  Synthetically generated peptide
  VARIANT (1)..(17): Xaa = Any Amino Acid
ACXXEXYCAXNPACTGC

SEQ ID NO: 8260 - protein, 17 aa, Artificial Sequence
  Synthetically generated peptide
  VARIANT (1)..(17): Xaa = Any Amino Acid
ACXXEXYCANXPACTGC

SEQ ID NO: 8261 - protein, 17 aa, Artificial Sequence
  Synthetically generated peptide
  VARIANT (1)..(17): Xaa = Any Amino Acid
ACXXEXYCANPXACTGC

SEQ ID NO: 8262 - protein, 17 aa, Artificial Sequence
  Synthetically generated peptide
  VARIANT (1)..(17): Xaa = Any Amino Acid
ACXXEXYCANPAXCTGC

SEQ ID NO: 8263 - protein, 17 aa, Artificial Sequence
  Synthetically generated peptide
  VARIANT (1)..(17): Xaa = Any Amino Acid
ACXXEXYCANPACXTGC

SEQ ID NO: 8264 - protein, 17 aa, Artificial Sequence
  Synthetically generated peptide
  VARIANT (1)..(17): Xaa = Any Amino Acid
ACXXEXYCANPACTXGC

SEQ ID NO: 8265 - protein, 17 aa, Artificial Sequence
  Synthetically generated peptide
  VARIANT (1)..(17): Xaa = Any Amino Acid
ACXXEXYCANPACTGXC

SEQ ID NO: 8266 - protein, 16 aa, Artificial Sequence
  Synthetically generated peptide
  VARIANT (1)..(16): Xaa = Any Amino Acid
ACXXEYXCANPACTGC

SEQ ID NO: 8267 - protein, 17 aa, Artificial Sequence
  Synthetically generated peptide
  VARIANT (1)..(17): Xaa = Any Amino Acid
ACXXEYXXCANPACTGC

SEQ ID NO: 8268 - protein, 17 aa, Artificial Sequence
  Synthetically generated peptide
  VARIANT (1)..(17): Xaa = Any Amino Acid
ACXXEYXCAXNPACTGC

SEQ ID NO: 8269 - protein, 17 aa, Artificial Sequence
  Synthetically generated peptide
  VARIANT (1)..(17): Xaa = Any Amino Acid
ACXXEYXCANXPACTGC

SEQ ID NO: 8270 - protein, 17 aa, Artificial Sequence
  Synthetically generated peptide
  VARIANT (1)..(17): Xaa = Any Amino Acid
ACXXEYXCANPXACTGC

SEQ ID NO: 8271 - protein, 17 aa, Artificial Sequence
  Synthetically generated peptide
  VARIANT (1)..(17): Xaa = Any Amino Acid
ACXXEYXCANPAXCTGC

SEQ ID NO: 8272 - protein, 17 aa, Artificial Sequence
  Synthetically generated peptide
  VARIANT (1)..(17): Xaa = Any Amino Acid
ACXXEYXCANPACXTGC

SEQ ID NO: 8273 - protein, 17 aa, Artificial Sequence
  Synthetically generated peptide
  VARIANT (1)..(17): Xaa = Any Amino Acid
ACXXEYXCANPACTXGC

SEQ ID NO: 8274 - protein, 17 aa, Artificial Sequence
  Synthetically generated peptide
  VARIANT (1)..(17): Xaa = Any Amino Acid
ACXXEYXCANPACTGXC

SEQ ID NO: 8275 - protein, 16 aa, Artificial Sequence
  Synthetically generated peptide
  VARIANT (1)..(16): Xaa = Any Amino Acid
ACXXEYCAXNPACTGC

SEQ ID NO: 8276 - protein, 17 aa, Artificial Sequence
  Synthetically generated peptide
  VARIANT (1)..(17): Xaa = Any Amino Acid
ACXXEYCAXXNPACTGC

SEQ ID NO: 8277 - protein, 17 aa, Artificial Sequence
  Synthetically generated peptide
  VARIANT (1)..(17): Xaa = Any Amino Acid
ACXXEYCAXNXPACTGC

SEQ ID NO: 8278 - protein, 17 aa, Artificial Sequence
  Synthetically generated peptide
  VARIANT (1)..(17): Xaa = Any Amino Acid
ACXXEYCAXNPXACTGC

SEQ ID NO: 8279 - protein, 17 aa, Artificial Sequence
  Synthetically generated peptide
  VARIANT (1)..(17): Xaa = Any Amino Acid
ACXXEYCAXNPAXCTGC

SEQ ID NO: 8280 - protein, 17 aa, Artificial Sequence
  Synthetically generated peptide
  VARIANT (1)..(17): Xaa = Any Amino Acid
ACXXEYCAXNPACXTGC

SEQ ID NO: 8281 - protein, 17 aa, Artificial Sequence
  Synthetically generated peptide
  VARIANT (1)..(17): Xaa = Any Amino Acid
ACXXEYCAXNPACTXGC

SEQ ID NO: 8282 - protein, 17 aa, Artificial Sequence
  Synthetically generated peptide
  VARIANT (1)..(17): Xaa = Any Amino Acid
ACXXEYCAXNPACTGXC

SEQ ID NO: 8283 - protein, 16 aa, Artificial Sequence
  Synthetically generated peptide
  VARIANT (1)..(16): Xaa = Any Amino Acid
ACXXEYCANXPACTGC

SEQ ID NO: 8284 - protein, 17 aa, Artificial Sequence
  Synthetically generated peptide
  VARIANT (1)..(17): Xaa = Any Amino Acid
ACXXEYCANXXPACTGC

SEQ ID NO: 8285 - protein, 17 aa, Artificial Sequence
  Synthetically generated peptide
  VARIANT (1)..(17): Xaa = Any Amino Acid
ACXXEYCANXPXACTGC

SEQ ID NO: 8286 - protein, 17 aa, Artificial Sequence
  Synthetically generated peptide
  VARIANT (1)..(17): Xaa = Any Amino Acid
ACXXEYCANXPAXCTGC

SEQ ID NO: 8287 - protein, 17 aa, Artificial Sequence
  Synthetically generated peptide
  VARIANT (1)..(17): Xaa = Any Amino Acid
ACXXEYCANXPACXTGC

SEQ ID NO: 8288 - protein, 17 aa, Artificial Sequence
  Synthetically generated peptide
  VARIANT (1)..(17): Xaa = Any Amino Acid
ACXXEYCANXPACTXGC

SEQ ID NO: 8289 - protein, 17 aa, Artificial Sequence
  Synthetically generated peptide
  VARIANT (1)..(17): Xaa = Any Amino Acid
ACXXEYCANXPACTGXC

SEQ ID NO: 8290 - protein, 16 aa, Artificial Sequence
  Synthetically generated peptide
  VARIANT (1)..(16): Xaa = Any Amino Acid
ACXXEYCANPXACTGC

SEQ ID NO: 8291 - protein, 17 aa, Artificial Sequence
  Synthetically generated peptide
  VARIANT (1)..(17): Xaa = Any Amino Acid
ACXXEYCANPXXACTGC

SEQ ID NO: 8292 - protein, 17 aa, Artificial Sequence
  Synthetically generated peptide
  VARIANT (1)..(17): Xaa = Any Amino Acid
ACXXEYCANPXAXCTGC

SEQ ID NO: 8293 - protein, 17 aa, Artificial Sequence
  Synthetically generated peptide
  VARIANT (1)..(17): Xaa = Any Amino Acid
ACXXEYCANPXACXTGC

SEQ ID NO: 8294 - protein, 17 aa, Artificial Sequence
  Synthetically generated peptide
  VARIANT (1)..(17): Xaa = Any Amino Acid
ACXXEYCANPXACTXGC

SEQ ID NO: 8295 - protein, 17 aa, Artificial Sequence
  Synthetically generated peptide
  VARIANT (1)..(17): Xaa = Any Amino Acid
ACXXEYCANPXACTGXC

SEQ ID NO: 8296 - protein, 16 aa, Artificial Sequence
  Synthetically generated peptide
  VARIANT (1)..(16): Xaa = Any Amino Acid
ACXXEYCANPAXCTGC

SEQ ID NO: 8297 - protein, 17 aa, Artificial Sequence
  Synthetically generated peptide
  VARIANT (1)..(17): Xaa = Any Amino Acid
ACXXEYCANPAXXCTGC

SEQ ID NO: 8298 - protein, 17 aa, Artificial Sequence
  Synthetically generated peptide
  VARIANT (1)..(17): Xaa = Any Amino Acid
ACXXEYCANPAXCXTGC

SEQ ID NO: 8299 - protein, 17 aa, Artificial Sequence
  Synthetically generated peptide
  VARIANT (1)..(17): Xaa = Any Amino Acid
ACXXEYCANPAXCTXGC

SEQ ID NO: 8300 - protein, 17 aa, Artificial Sequence
  Synthetically generated peptide
  VARIANT (1)..(17): Xaa = Any Amino Acid
ACXXEYCANPAXCTGXC

SEQ ID NO: 8301 - protein, 16 aa, Artificial Sequence
  Synthetically generated peptide
  VARIANT (1)..(16): Xaa = Any Amino Acid
ACXXEYCANPACXTGC

SEQ ID NO: 8302 - protein, 17 aa, Artificial Sequence
  Synthetically generated peptide
  VARIANT (1)..(17): Xaa = Any Amino Acid
ACXXEYCANPACXXTGC

SEQ ID NO: 8303 - protein, 17 aa, Artificial Sequence
  Synthetically generated peptide
  VARIANT (1)..(17): Xaa = Any Amino Acid
ACXXEYCANPACXTXGC

SEQ ID NO: 8304 - protein, 17 aa, Artificial Sequence
  Synthetically generated peptide
  VARIANT (1)..(17): Xaa = Any Amino Acid
ACXXEYCANPACXTGXC

SEQ ID NO: 8305 - protein, 16 aa, Artificial Sequence
  Synthetically generated peptide
  VARIANT (1)..(16): Xaa = Any Amino Acid
ACXXEYCANPACTXGC

SEQ ID NO: 8306 - protein, 17 aa, Artificial Sequence
  Synthetically generated peptide
  VARIANT (1)..(17): Xaa = Any Amino Acid
ACXXEYCANPACTXXGC

SEQ ID NO: 8307 - protein, 17 aa, Artificial Sequence
  Synthetically generated peptide
  VARIANT (1)..(17): Xaa = Any Amino Acid
ACXXEYCANPACTXGXC

SEQ ID NO: 8308 - protein, 16 aa, Artificial Sequence
  Synthetically generated peptide
  VARIANT (1)..(16): Xaa = Any Amino Acid
ACXXEYCANPACTGXC

SEQ ID NO: 8309 - protein, 17 aa, Artificial Sequence
  Synthetically generated peptide
  VARIANT (1)..(17): Xaa = Any Amino Acid
ACXXEYCANPACTGXXC

SEQ ID NO: 8310 - protein, 15 aa, Artificial Sequence
  Synthetically generated peptide
  VARIANT (1)..(15): Xaa = Any Amino Acid
ACXEXYCANPACTGC

SEQ ID NO: 8311 - protein, 16 aa, Artificial Sequence
  Synthetically generated peptide
  VARIANT (1)..(16): Xaa = Any Amino Acid
ACXEXXYCANPACTGC

SEQ ID NO: 8312 - protein, 17 aa, Artificial Sequence
  Synthetically generated peptide
  VARIANT (1)..(17): Xaa = Any Amino Acid
ACXEXXXYCANPACTGC

SEQ ID NO: 8313 - protein, 17 aa, Artificial Sequence
  Synthetically generated peptide
  VARIANT (1)..(17): Xaa = Any Amino Acid
ACXEXXYXCANPACTGC

SEQ ID NO: 8314 - protein, 17 aa, Artificial Sequence
  Synthetically generated peptide
  VARIANT (1)..(17): Xaa = Any Amino Acid
ACXEXXYCAXNPACTGC

SEQ ID NO: 8315 - protein, 17 aa, Artificial Sequence
  Synthetically generated peptide
  VARIANT (1)..(17): Xaa = Any Amino Acid
ACXEXXYCANXPACTGC

SEQ ID NO: 8316 - protein, 17 aa, Artificial Sequence
  Synthetically generated peptide
  VARIANT (1)..(17): Xaa = Any Amino Acid
ACXEXXYCANPXACTGC

SEQ ID NO: 8317 - protein, 17 aa, Artificial Sequence
  Synthetically generated peptide
  VARIANT (1)..(17): Xaa = Any Amino Acid
ACXEXXYCANPAXCTGC

SEQ ID NO: 8318 - protein, 17 aa, Artificial Sequence
  Synthetically generated peptide
  VARIANT (1)..(17): Xaa = Any Amino Acid
ACXEXXYCANPACXTGC

SEQ ID NO: 8319 - protein, 17 aa, Artificial Sequence
  Synthetically generated peptide
  VARIANT (1)..(17): Xaa = Any Amino Acid
ACXEXXYCANPACTXGC

SEQ ID NO: 8320 - protein, 17 aa, Artificial Sequence
  Synthetically generated peptide
  VARIANT (1)..(17): Xaa = Any Amino Acid
ACXEXXYCANPACTGXC

SEQ ID NO: 8321 - protein, 16 aa, Artificial Sequence
  Synthetically generated peptide
  VARIANT (1)..(16): Xaa = Any Amino Acid
ACXEXYXCANPACTGC

SEQ ID NO: 8322 - protein, 17 aa, Artificial Sequence
  Synthetically generated peptide
  VARIANT (1)..(17): Xaa = Any Amino Acid
ACXEXYXXCANPACTGC

SEQ ID NO: 8323 - protein, 17 aa, Artificial Sequence
  Synthetically generated peptide
  VARIANT (1)..(17): Xaa = Any Amino Acid
ACXEXYXCAXNPACTGC

SEQ ID NO: 8324 - protein, 17 aa, Artificial Sequence
  Synthetically generated peptide
  VARIANT (1)..(17): Xaa = Any Amino Acid
ACXEXYXCANXPACTGC

SEQ ID NO: 8325 - protein, 17 aa, Artificial Sequence
  Synthetically generated peptide
  VARIANT (1)..(17): Xaa = Any Amino Acid
ACXEXYXCANPXACTGC

SEQ ID NO: 8326 - protein, 17 aa, Artificial Sequence
  Synthetically generated peptide
  VARIANT (1)..(17): Xaa = Any Amino Acid
ACXEXYXCANPAXCTGC

SEQ ID NO: 8327 - protein, 17 aa, Artificial Sequence
  Synthetically generated peptide
  VARIANT (1)..(17): Xaa = Any Amino Acid
ACXEXYXCANPACXTGC

SEQ ID NO: 8328 - protein, 17 aa, Artificial Sequence
  Synthetically generated peptide
  VARIANT (1)..(17): Xaa = Any Amino Acid
ACXEXYXCANPACTXGC

SEQ ID NO: 8329 - protein, 17 aa, Artificial Sequence
  Synthetically generated peptide
  VARIANT (1)..(17): Xaa = Any Amino Acid
ACXEXYXCANPACTGXC

SEQ ID NO: 8330 - protein, 16 aa, Artificial Sequence
  Synthetically generated peptide
  VARIANT (1)..(16): Xaa = Any Amino Acid
ACXEXYCAXNPACTGC

SEQ ID NO: 8331 - protein, 17 aa, Artificial Sequence
  Synthetically generated peptide
  VARIANT (1)..(17): Xaa = Any Amino Acid
ACXEXYCAXXNPACTGC

SEQ ID NO: 8332 - protein, 17 aa, Artificial Sequence
  Synthetically generated peptide
  VARIANT (1)..(17): Xaa = Any Amino Acid
ACXEXYCAXNXPACTGC

SEQ ID NO: 8333 - protein, 17 aa, Artificial Sequence
  Synthetically generated peptide
  VARIANT (1)..(17): Xaa = Any Amino Acid
ACXEXYCAXNPXACTGC

SEQ ID NO: 8334 - protein, 17 aa, Artificial Sequence
  Synthetically generated peptide
  VARIANT (1)..(17): Xaa = Any Amino Acid
ACXEXYCAXNPAXCTGC

SEQ ID NO: 8335 - protein, 17 aa, Artificial Sequence
  Synthetically generated peptide
  VARIANT (1)..(17): Xaa = Any Amino Acid
ACXEXYCAXNPACXTGC

SEQ ID NO: 8336 - protein, 17 aa, Artificial Sequence
  Synthetically generated peptide
  VARIANT (1)..(17): Xaa = Any Amino Acid
ACXEXYCAXNPACTXGC

SEQ ID NO: 8337 - protein, 17 aa, Artificial Sequence
  Synthetically generated peptide
  VARIANT (1)..(17): Xaa = Any Amino Acid
ACXEXYCAXNPACTGXC

SEQ ID NO: 8338 - protein, 16 aa, Artificial Sequence
  Synthetically generated peptide
  VARIANT (1)..(16): Xaa = Any Amino Acid
ACXEXYCANXPACTGC

SEQ ID NO: 8339 - protein, 17 aa, Artificial Sequence
  Synthetically generated peptide
  VARIANT (1)..(17): Xaa = Any Amino Acid
ACXEXYCANXXPACTGC

SEQ ID NO: 8340 - protein, 17 aa, Artificial Sequence
  Synthetically generated peptide
  VARIANT (1)..(17): Xaa = Any Amino Acid
ACXEXYCANXPXACTGC

SEQ ID NO: 8341 - protein, 17 aa, Artificial Sequence
  Synthetically generated peptide
  VARIANT (1)..(17): Xaa = Any Amino Acid
ACXEXYCANXPAXCTGC

SEQ ID NO: 8342 - protein, 17 aa, Artificial Sequence
  Synthetically generated peptide
  VARIANT (1)..(17): Xaa = Any Amino Acid
ACXEXYCANXPACXTGC

SEQ ID NO: 8343 - protein, 17 aa, Artificial Sequence
  Synthetically generated peptide
  VARIANT (1)..(17): Xaa = Any Amino Acid
ACXEXYCANXPACTXGC

SEQ ID NO: 8344 - protein, 17 aa, Artificial Sequence
  Synthetically generated peptide
  VARIANT (1)..(17): Xaa = Any Amino Acid
ACXEXYCANXPACTGXC

SEQ ID NO: 8345 - protein, 16 aa, Artificial Sequence
  Synthetically generated peptide
  VARIANT (1)..(16): Xaa = Any Amino Acid
ACXEXYCANPXACTGC

SEQ ID NO: 8346 - protein, 17 aa, Artificial Sequence
  Synthetically generated peptide
  VARIANT (1)..(17): Xaa = Any Amino Acid
ACXEXYCANPXXACTGC

SEQ ID NO: 8347 - protein, 17 aa, Artificial Sequence
  Synthetically generated peptide
  VARIANT (1)..(17): Xaa = Any Amino Acid
ACXEXYCANPXAXCTGC

SEQ ID NO: 8348 - protein, 17 aa, Artificial Sequence
  Synthetically generated peptide
  VARIANT (1)..(17): Xaa = Any Amino Acid
ACXEXYCANPXACXTGC

SEQ ID NO: 8349 - protein, 17 aa, Artificial Sequence
  Synthetically generated peptide
  VARIANT (1)..(17): Xaa = Any Amino Acid
ACXEXYCANPXACTXGC

SEQ ID NO: 8350 - protein, 17 aa, Artificial Sequence
  Synthetically generated peptide
  VARIANT (1)..(17): Xaa = Any Amino Acid
ACXEXYCANPXACTGXC

SEQ ID NO: 8351 - protein, 16 aa, Artificial Sequence
  Synthetically generated peptide
  VARIANT (1)..(16): Xaa = Any Amino Acid
ACXEXYCANPAXCTGC

SEQ ID NO: 8352 - protein, 17 aa, Artificial Sequence
  Synthetically generated peptide
  VARIANT (1)..(17): Xaa = Any Amino Acid
ACXEXYCANPAXXCTGC

SEQ ID NO: 8353 - protein, 17 aa, Artificial Sequence
  Synthetically generated peptide
  VARIANT (1)..(17): Xaa = Any Amino Acid
ACXEXYCANPAXCXTGC

SEQ ID NO: 8354 - protein, 17 aa, Artificial Sequence
  Synthetically generated peptide
  VARIANT (1)..(17): Xaa = Any Amino Acid
ACXEXYCANPAXCTXGC

SEQ ID NO: 8355 - protein, 17 aa, Artificial Sequence
  Synthetically generated peptide
  VARIANT (1)..(17): Xaa = Any Amino Acid
ACXEXYCANPAXCTGXC

SEQ ID NO: 8356 - protein, 16 aa, Artificial Sequence
  Synthetically generated peptide
  VARIANT (1)..(16): Xaa = Any Amino Acid
ACXEXYCANPACXTGC

SEQ ID NO: 8357 - protein, 17 aa, Artificial Sequence
  Synthetically generated peptide
  VARIANT (1)..(17): Xaa = Any Amino Acid
ACXEXYCANPACXXTGC

SEQ ID NO: 8358 - protein, 17 aa, Artificial Sequence
  Synthetically generated peptide
  VARIANT (1)..(17): Xaa = Any Amino Acid
ACXEXYCANPACXTXGC

SEQ ID NO: 8359 - protein, 17 aa, Artificial Sequence
  Synthetically generated peptide
  VARIANT (1)..(17): Xaa = Any Amino Acid
ACXEXYCANPACXTGXC

SEQ ID NO: 8360 - protein, 16 aa, Artificial Sequence
  Synthetically generated peptide
  VARIANT (1)..(16): Xaa = Any Amino Acid
ACXEXYCANPACTXGC

SEQ ID NO: 8361 - protein, 17 aa, Artificial Sequence
  Synthetically generated peptide
  VARIANT (1)..(17): Xaa = Any Amino Acid
ACXEXYCANPACTXXGC

SEQ ID NO: 8362 - protein, 17 aa, Artificial Sequence
  Synthetically generated peptide
  VARIANT (1)..(17): Xaa = Any Amino Acid
ACXEXYCANPACTXGXC

SEQ ID NO: 8363 - protein, 16 aa, Artificial Sequence
  Synthetically generated peptide
  VARIANT (1)..(16): Xaa = Any Amino Acid
ACXEXYCANPACTGXC

SEQ ID NO: 8364 - protein, 17 aa, Artificial Sequence
  Synthetically generated peptide
  VARIANT (1)..(17): Xaa = Any Amino Acid
ACXEXYCANPACTGXXC

SEQ ID NO: 8365 - protein, 15 aa, Artificial Sequence
  Synthetically generated peptide
  VARIANT (1)..(15): Xaa = Any Amino Acid
ACXEYXCANPACTGC

SEQ ID NO: 8366 - protein, 16 aa, Artificial Sequence
  Synthetically generated peptide
  VARIANT (1)..(16): Xaa = Any Amino Acid
ACXEYXXCANPACTGC

SEQ ID NO: 8367 - protein, 17 aa, Artificial Sequence
  Synthetically generated peptide
  VARIANT (1)..(17): Xaa = Any Amino Acid
ACXEYXXXCANPACTGC

SEQ ID NO: 8368 - protein, 17 aa, Artificial Sequence
  Synthetically generated peptide
  VARIANT (1)..(17): Xaa = Any Amino Acid
ACXEYXXCAXNPACTGC

SEQ ID NO: 8369 - protein, 17 aa, Artificial Sequence
  Synthetically generated peptide
  VARIANT (1)..(17): Xaa = Any Amino Acid
ACXEYXXCANXPACTGC

SEQ ID NO: 8370 - protein, 17 aa, Artificial Sequence
  Synthetically generated peptide
  VARIANT (1)..(17): Xaa = Any Amino Acid
ACXEYXXCANPXACTGC

SEQ ID NO: 8371 - protein, 17 aa, Artificial Sequence
  Synthetically generated peptide
  VARIANT (1)..(17): Xaa = Any Amino Acid
ACXEYXXCANPAXCTGC

SEQ ID NO: 8372 - protein, 17 aa, Artificial Sequence
  Synthetically generated peptide
  VARIANT (1)..(17): Xaa = Any Amino Acid
ACXEYXXCANPACXTGC

SEQ ID NO: 8373 - protein, 17 aa, Artificial Sequence
  Synthetically generated peptide
  VARIANT (1)..(17): Xaa = Any Amino Acid
ACXEYXXCANPACTXGC

SEQ ID NO: 8374 - protein, 17 aa, Artificial Sequence
  Synthetically generated peptide
  VARIANT (1)..(17): Xaa = Any Amino Acid
ACXEYXXCANPACTGXC

SEQ ID NO: 8375 - protein, 16 aa, Artificial Sequence
  Synthetically generated peptide
  VARIANT (1)..(16): Xaa = Any Amino Acid
ACXEYXCAXNPACTGC

SEQ ID NO: 8376 - protein, 17 aa, Artificial Sequence
  Synthetically generated peptide
  VARIANT (1)..(17): Xaa = Any Amino Acid
ACXEYXCAXXNPACTGC

SEQ ID NO: 8377 - protein, 17 aa, Artificial Sequence
  Synthetically generated peptide
  VARIANT (1)..(17): Xaa = Any Amino Acid
ACXEYXCAXNXPACTGC

SEQ ID NO: 8378 - protein, 17 aa, Artificial Sequence
  Synthetically generated peptide
  VARIANT (1)..(17): Xaa = Any Amino Acid
ACXEYXCAXNPXACTGC

SEQ ID NO: 8379 - protein, 17 aa, Artificial Sequence
  Synthetically generated peptide
  VARIANT (1)..(17): Xaa = Any Amino Acid
ACXEYXCAXNPAXCTGC

SEQ ID NO: 8380 - protein, 17 aa, Artificial Sequence
  Synthetically generated peptide
  VARIANT (1)..(17): Xaa = Any Amino Acid
ACXEYXCAXNPACXTGC

SEQ ID NO: 8381 - protein, 17 aa, Artificial Sequence
  Synthetically generated peptide
  VARIANT (1)..(17): Xaa = Any Amino Acid
ACXEYXCAXNPACTXGC

SEQ ID NO: 8382 - protein, 17 aa, Artificial Sequence
  Synthetically generated peptide
  VARIANT (1)..(17): Xaa = Any Amino Acid
ACXEYXCAXNPACTGXC

SEQ ID NO: 8383 - protein, 16 aa, Artificial Sequence
  Synthetically generated peptide
  VARIANT (1)..(16): Xaa = Any Amino Acid
ACXEYXCANXPACTGC

SEQ ID NO: 8384 - protein, 17 aa, Artificial Sequence
  Synthetically generated peptide
  VARIANT (1)..(17): Xaa = Any Amino Acid
ACXEYXCANXXPACTGC

SEQ ID NO: 8385 - protein, 17 aa, Artificial Sequence
  Synthetically generated peptide
  VARIANT (1)..(17): Xaa = Any Amino Acid
ACXEYXCANXPXACTGC

SEQ ID NO: 8386 - protein, 17 aa, Artificial Sequence
  Synthetically generated peptide
  VARIANT (1)..(17): Xaa = Any Amino Acid
ACXEYXCANXPAXCTGC

SEQ ID NO: 8387 - protein, 17 aa, Artificial Sequence
  Synthetically generated peptide
  VARIANT (1)..(17): Xaa = Any Amino Acid
ACXEYXCANXPACXTGC

SEQ ID NO: 8388 - protein, 17 aa, Artificial Sequence
  Synthetically generated peptide
  VARIANT (1)..(17): Xaa = Any Amino Acid
ACXEYXCANXPACTXGC

SEQ ID NO: 8389 - protein, 17 aa, Artificial Sequence
  Synthetically generated peptide
  VARIANT (1)..(17): Xaa = Any Amino Acid
ACXEYXCANXPACTGXC

SEQ ID NO: 8390 - protein, 16 aa, Artificial Sequence
  Synthetically generated peptide
  VARIANT (1)..(16): Xaa = Any Amino Acid
ACXEYXCANPXACTGC

SEQ ID NO: 8391 - protein, 17 aa, Artificial Sequence
  Synthetically generated peptide
  VARIANT (1)..(17): Xaa = Any Amino Acid
ACXEYXCANPXXACTGC

SEQ ID NO: 8392 - protein, 17 aa, Artificial Sequence
  Synthetically generated peptide
  VARIANT (1)..(17): Xaa = Any Amino Acid
ACXEYXCANPXAXCTGC

SEQ ID NO: 8393 - protein, 17 aa, Artificial Sequence
  Synthetically generated peptide
  VARIANT (1)..(17): Xaa = Any Amino Acid
ACXEYXCANPXACXTGC

SEQ ID NO: 8394 - protein, 17 aa, Artificial Sequence
  Synthetically generated peptide
  VARIANT (1)..(17): Xaa = Any Amino Acid
ACXEYXCANPXACTXGC

SEQ ID NO: 8395 - protein, 17 aa, Artificial Sequence
  Synthetically generated peptide
  VARIANT (1)..(17): Xaa = Any Amino Acid
ACXEYXCANPXACTGXC

SEQ ID NO: 8396 - protein, 16 aa, Artificial Sequence
  Synthetically generated peptide
  VARIANT (1)..(16): Xaa = Any Amino Acid
ACXEYXCANPAXCTGC

SEQ ID NO: 8397 - protein, 17 aa, Artificial Sequence
  Synthetically generated peptide
  VARIANT (1)..(17): Xaa = Any Amino Acid
ACXEYXCANPAXXCTGC

SEQ ID NO: 8398 - protein, 17 aa, Artificial Sequence
  Synthetically generated peptide
  VARIANT (1)..(17): Xaa = Any Amino Acid
ACXEYXCANPAXCXTGC

SEQ ID NO: 8399 - protein, 17 aa, Artificial Sequence
  Synthetically generated peptide
  VARIANT (1)..(17): Xaa = Any Amino Acid
ACXEYXCANPAXCTXGC

SEQ ID NO: 8400 - protein, 17 aa, Artificial Sequence
  Synthetically generated peptide
  VARIANT (1)..(17): Xaa = Any Amino Acid
ACXEYXCANPAXCTGXC

SEQ ID NO: 8401 - protein, 16 aa, Artificial Sequence
  Synthetically generated peptide
  VARIANT (1)..(16): Xaa = Any Amino Acid
ACXEYXCANPACXTGC

SEQ ID NO: 8402 - protein, 17 aa, Artificial Sequence
  Synthetically generated peptide
  VARIANT (1)..(17): Xaa = Any Amino Acid
ACXEYXCANPACXXTGC

SEQ ID NO: 8403 - protein, 17 aa, Artificial Sequence
  Synthetically generated peptide
  VARIANT (1)..(17): Xaa = Any Amino Acid
ACXEYXCANPACXTXGC

SEQ ID NO: 8404 - protein, 17 aa, Artificial Sequence
  Synthetically generated peptide
  VARIANT (1)..(17): Xaa = Any Amino Acid
ACXEYXCANPACXTGXC

SEQ ID NO: 8405 - protein, 16 aa, Artificial Sequence
  Synthetically generated peptide
  VARIANT (1)..(16): Xaa = Any Amino Acid
ACXEYXCANPACTXGC

SEQ ID NO: 8406 - protein, 17 aa, Artificial Sequence
  Synthetically generated peptide
  VARIANT (1)..(17): Xaa = Any Amino Acid
ACXEYXCANPACTXXGC

SEQ ID NO: 8407 - protein, 17 aa, Artificial Sequence
  Synthetically generated peptide
  VARIANT (1)..(17): Xaa = Any Amino Acid
ACXEYXCANPACTXGXC

SEQ ID NO: 8408 - protein, 16 aa, Artificial Sequence
  Synthetically generated peptide
  VARIANT (1)..(16): Xaa = Any Amino Acid
ACXEYXCANPACTGXC

SEQ ID NO: 8409 - protein, 17 aa, Artificial Sequence
  Synthetically generated peptide
  VARIANT (1)..(17): Xaa = Any Amino Acid
ACXEYXCANPACTGXXC

SEQ ID NO: 8410 - protein, 15 aa, Artificial Sequence
  Synthetically generated peptide
  VARIANT (1)..(15): Xaa = Any Amino Acid
ACXEYCAXNPACTGC

SEQ ID NO: 8411 - protein, 16 aa, Artificial Sequence
  Synthetically generated peptide
  VARIANT (1)..(16): Xaa = Any Amino Acid
ACXEYCAXXNPACTGC

SEQ ID NO: 8412 - protein, 17 aa, Artificial Sequence
  Synthetically generated peptide
  VARIANT (1)..(17): Xaa = Any Amino Acid
ACXEYCAXXXNPACTGC

SEQ ID NO: 8413 - protein, 17 aa, Artificial Sequence
  Synthetically generated peptide
  VARIANT (1)..(17): Xaa = Any Amino Acid
ACXEYCAXXNXPACTGC

SEQ ID NO: 8414 - protein, 17 aa, Artificial Sequence
  Synthetically generated peptide
  VARIANT (1)..(17): Xaa = Any Amino Acid
ACXEYCAXXNPXACTGC

SEQ ID NO: 8415 - protein, 17 aa, Artificial Sequence
  Synthetically generated peptide
  VARIANT (1)..(17): Xaa = Any Amino Acid
ACXEYCAXXNPAXCTGC

SEQ ID NO: 8416 - protein, 17 aa, Artificial Sequence
  Synthetically generated peptide
  VARIANT (1)..(17): Xaa = Any Amino Acid
ACXEYCAXXNPACXTGC

SEQ ID NO: 8417 - protein, 17 aa, Artificial Sequence
  Synthetically generated peptide
  VARIANT (1)..(17): Xaa = Any Amino Acid
ACXEYCAXXNPACTXGC

SEQ ID NO: 8418 - protein, 17 aa, Artificial Sequence
  Synthetically generated peptide
  VARIANT (1)..(17): Xaa = Any Amino Acid
ACXEYCAXXNPACTGXC

SEQ ID NO: 8419 - protein, 16 aa, Artificial Sequence
  Synthetically generated peptide
  VARIANT (1)..(16): Xaa = Any Amino Acid
ACXEYCAXNXPACTGC

SEQ ID NO: 8420 - protein, 17 aa, Artificial Sequence
  Synthetically generated peptide
  VARIANT (1)..(17): Xaa = Any Amino Acid
ACXEYCAXNXXPACTGC

SEQ ID NO: 8421 - protein, 17 aa, Artificial Sequence
  Synthetically generated peptide
  VARIANT (1)..(17): Xaa = Any Amino Acid
ACXEYCAXNXPXACTGC

SEQ ID NO: 8422 - protein, 17 aa, Artificial Sequence
  Synthetically generated peptide
  VARIANT (1)..(17): Xaa = Any Amino Acid
ACXEYCAXNXPAXCTGC

SEQ ID NO: 8423 - protein, 17 aa, Artificial Sequence
  Synthetically generated peptide
  VARIANT (1)..(17): Xaa = Any Amino Acid
ACXEYCAXNXPACXTGC

SEQ ID NO: 8424 - protein, 17 aa, Artificial Sequence
  Synthetically generated peptide
  VARIANT (1)..(17): Xaa = Any Amino Acid
ACXEYCAXNXPACTXGC

SEQ ID NO: 8425 - protein, 17 aa, Artificial Sequence
  Synthetically generated peptide
  VARIANT (1)..(17): Xaa = Any Amino Acid
ACXEYCAXNXPACTGXC

SEQ ID NO: 8426 - protein, 16 aa, Artificial Sequence
  Synthetically generated peptide
  VARIANT (1)..(16): Xaa = Any Amino Acid
ACXEYCAXNPXACTGC

SEQ ID NO: 8427 - protein, 17 aa, Artificial Sequence
  Synthetically generated peptide
  VARIANT (1)..(17): Xaa = Any Amino Acid
ACXEYCAXNPXXACTGC

SEQ ID NO: 8428 - protein, 17 aa, Artificial Sequence
  Synthetically generated peptide
  VARIANT (1)..(17): Xaa = Any Amino Acid
ACXEYCAXNPXAXCTGC

SEQ ID NO: 8429 - protein, 17 aa, Artificial Sequence
  Synthetically generated peptide
  VARIANT (1)..(17): Xaa = Any Amino Acid
ACXEYCAXNPXACXTGC

SEQ ID NO: 8430 - protein, 17 aa, Artificial Sequence
  Synthetically generated peptide
  VARIANT (1)..(17): Xaa = Any Amino Acid
ACXEYCAXNPXACTXGC

SEQ ID NO: 8431 - protein, 17 aa, Artificial Sequence
  Synthetically generated peptide
  VARIANT (1)..(17): Xaa = Any Amino Acid
ACXEYCAXNPXACTGXC

SEQ ID NO: 8432 - protein, 16 aa, Artificial Sequence
  Synthetically generated peptide
  VARIANT (1)..(16): Xaa = Any Amino Acid
ACXEYCAXNPAXCTGC

SEQ ID NO: 8433 - protein, 17 aa, Artificial Sequence
  Synthetically generated peptide
  VARIANT (1)..(17): Xaa = Any Amino Acid
ACXEYCAXNPAXXCTGC

SEQ ID NO: 8434 - protein, 17 aa, Artificial Sequence
  Synthetically generated peptide
  VARIANT (1)..(17): Xaa = Any Amino Acid
ACXEYCAXNPAXCXTGC

SEQ ID NO: 8435 - protein, 17 aa, Artificial Sequence
  Synthetically generated peptide
  VARIANT (1)..(17): Xaa = Any Amino Acid
ACXEYCAXNPAXCTXGC

SEQ ID NO: 8436 - protein, 17 aa, Artificial Sequence
  Synthetically generated peptide
  VARIANT (1)..(17): Xaa = Any Amino Acid
ACXEYCAXNPAXCTGXC

SEQ ID NO: 8437 - protein, 16 aa, Artificial Sequence
  Synthetically generated peptide
  VARIANT (1)..(16): Xaa = Any Amino Acid
ACXEYCAXNPACXTGC

SEQ ID NO: 8438 - protein, 17 aa, Artificial Sequence
  Synthetically generated peptide
  VARIANT (1)..(17): Xaa = Any Amino Acid
ACXEYCAXNPACXXTGC

SEQ ID NO: 8439 - protein, 17 aa, Artificial Sequence
  Synthetically generated peptide
  VARIANT (1)..(17): Xaa = Any Amino Acid
ACXEYCAXNPACXTXGC

SEQ ID NO: 8440 - protein, 17 aa, Artificial Sequence
  Synthetically generated peptide
  VARIANT (1)..(17): Xaa = Any Amino Acid
ACXEYCAXNPACXTGXC

SEQ ID NO: 8441 - protein, 16 aa, Artificial Sequence
  Synthetically generated peptide
  VARIANT (1)..(16): Xaa = Any Amino Acid
ACXEYCAXNPACTXGC

SEQ ID NO: 8442 - protein, 17 aa, Artificial Sequence
  Synthetically generated peptide
  VARIANT (1)..(17): Xaa = Any Amino Acid
ACXEYCAXNPACTXXGC

SEQ ID NO: 8443 - protein, 17 aa, Artificial Sequence
  Synthetically generated peptide
  VARIANT (1)..(17): Xaa = Any Amino Acid
ACXEYCAXNPACTXGXC

SEQ ID NO: 8444 - protein, 16 aa, Artificial Sequence
  Synthetically generated peptide
  VARIANT (1)..(16): Xaa = Any Amino Acid
ACXEYCAXNPACTGXC

SEQ ID NO: 8445 - protein, 17 aa, Artificial Sequence
  Synthetically generated peptide
  VARIANT (1)..(17): Xaa = Any Amino Acid
ACXEYCAXNPACTGXXC

SEQ ID NO: 8446 - protein, 15 aa, Artificial Sequence
  Synthetically generated peptide
  VARIANT (1)..(15): Xaa = Any Amino Acid
ACXEYCANXPACTGC

SEQ ID NO: 8447 - protein, 16 aa, Artificial Sequence
  Synthetically generated peptide
  VARIANT (1)..(16): Xaa = Any Amino Acid
ACXEYCANXXPACTGC

SEQ ID NO: 8448 - protein, 17 aa, Artificial Sequence
  Synthetically generated peptide
  VARIANT (1)..(17): Xaa = Any Amino Acid
ACXEYCANXXXPACTGC

SEQ ID NO: 8449 - protein, 17 aa, Artificial Sequence
  Synthetically generated peptide
  VARIANT (1)..(17): Xaa = Any Amino Acid
ACXEYCANXXPXACTGC

SEQ ID NO: 8450 - protein, 17 aa, Artificial Sequence
  Synthetically generated peptide
  VARIANT (1)..(17): Xaa = Any Amino Acid
ACXEYCANXXPAXCTGC

SEQ ID NO: 8451 - protein, 17 aa, Artificial Sequence
  Synthetically generated peptide
  VARIANT (1)..(17): Xaa = Any Amino Acid
ACXEYCANXXPACXTGC

SEQ ID NO: 8452 - protein, 17 aa, Artificial Sequence
  Synthetically generated peptide
  VARIANT (1)..(17): Xaa = Any Amino Acid
ACXEYCANXXPACTXGC

SEQ ID NO: 8453 - protein, 17 aa, Artificial Sequence
  Synthetically generated peptide
  VARIANT (1)..(17): Xaa = Any Amino Acid
ACXEYCANXXPACTGXC

SEQ ID NO: 8454 - protein, 16 aa, Artificial Sequence
  Synthetically generated peptide
  VARIANT (1)..(16): Xaa = Any Amino Acid
ACXEYCANXPXACTGC

SEQ ID NO: 8455 - protein, 17 aa, Artificial Sequence
  Synthetically generated peptide
  VARIANT (1)..(17): Xaa = Any Amino Acid
ACXEYCANXPXXACTGC

SEQ ID NO: 8456 - protein, 17 aa, Artificial Sequence
  Synthetically generated peptide
  VARIANT (1)..(17): Xaa = Any Amino Acid
ACXEYCANXPXAXCTGC

SEQ ID NO: 8457 - protein, 17 aa, Artificial Sequence
  Synthetically generated peptide
  VARIANT (1)..(17): Xaa = Any Amino Acid
ACXEYCANXPXACXTGC

SEQ ID NO: 8458 - protein, 17 aa, Artificial Sequence
  Synthetically generated peptide
  VARIANT (1)..(17): Xaa = Any Amino Acid
ACXEYCANXPXACTXGC

SEQ ID NO: 8459 - protein, 17 aa, Artificial Sequence
  Synthetically generated peptide
  VARIANT (1)..(17): Xaa = Any Amino Acid
ACXEYCANXPXACTGXC

SEQ ID NO: 8460 - protein, 16 aa, Artificial Sequence
  Synthetically generated peptide
  VARIANT (1)..(16): Xaa = Any Amino Acid
ACXEYCANXPAXCTGC

SEQ ID NO: 8461 - protein, 17 aa, Artificial Sequence
  Synthetically generated peptide
  VARIANT (1)..(17): Xaa = Any Amino Acid
ACXEYCANXPAXXCTGC

SEQ ID NO: 8462 - protein, 17 aa, Artificial Sequence
  Synthetically generated peptide
  VARIANT (1)..(17): Xaa = Any Amino Acid
ACXEYCANXPAXCXTGC

SEQ ID NO: 8463 - protein, 17 aa, Artificial Sequence
  Synthetically generated peptide
  VARIANT (1)..(17): Xaa = Any Amino Acid
ACXEYCANXPAXCTXGC

SEQ ID NO: 8464 - protein, 17 aa, Artificial Sequence
  Synthetically generated peptide
  VARIANT (1)..(17): Xaa = Any Amino Acid
ACXEYCANXPAXCTGXC

SEQ ID NO: 8465 - protein, 16 aa, Artificial Sequence
  Synthetically generated peptide
  VARIANT (1)..(16): Xaa = Any Amino Acid
ACXEYCANXPACXTGC

SEQ ID NO: 8466 - protein, 17 aa, Artificial Sequence
  Synthetically generated peptide
  VARIANT (1)..(17): Xaa = Any Amino Acid
ACXEYCANXPACXXTGC

SEQ ID NO: 8467 - protein, 17 aa, Artificial Sequence
  Synthetically generated peptide
  VARIANT (1)..(17): Xaa = Any Amino Acid
ACXEYCANXPACXTXGC

SEQ ID NO: 8468 - protein, 17 aa, Artificial Sequence
  Synthetically generated peptide
  VARIANT (1)..(17): Xaa = Any Amino Acid
ACXEYCANXPACXTGXC

SEQ ID NO: 8469 - protein, 16 aa, Artificial Sequence
  Synthetically generated peptide
  VARIANT (1)..(16): Xaa = Any Amino Acid
ACXEYCANXPACTXGC

SEQ ID NO: 8470 - protein, 17 aa, Artificial Sequence
  Synthetically generated peptide
  VARIANT (1)..(17): Xaa = Any Amino Acid
ACXEYCANXPACTXXGC

SEQ ID NO: 8471 - protein, 17 aa, Artificial Sequence
  Synthetically generated peptide
  VARIANT (1)..(17): Xaa = Any Amino Acid
ACXEYCANXPACTXGXC

SEQ ID NO: 8472 - protein, 16 aa, Artificial Sequence
  Synthetically generated peptide
  VARIANT (1)..(16): Xaa = Any Amino Acid
ACXEYCANXPACTGXC

SEQ ID NO: 8473 - protein, 17 aa, Artificial Sequence
  Synthetically generated peptide
  VARIANT (1)..(17): Xaa = Any Amino Acid
ACXEYCANXPACTGXXC

SEQ ID NO: 8474 - protein, 15 aa, Artificial Sequence
  Synthetically generated peptide
  VARIANT (1)..(15): Xaa = Any Amino Acid
ACXEYCANPXACTGC

SEQ ID NO: 8475 - protein, 16 aa, Artificial Sequence
  Synthetically generated peptide
  VARIANT (1)..(16): Xaa = Any Amino Acid
ACXEYCANPXXACTGC

SEQ ID NO: 8476 - protein, 17 aa, Artificial Sequence
  Synthetically generated peptide
  VARIANT (1)..(17): Xaa = Any Amino Acid
ACXEYCANPXXXACTGC

SEQ ID NO: 8477 - protein, 17 aa, Artificial Sequence
  Synthetically generated peptide
  VARIANT (1)..(17): Xaa = Any Amino Acid
ACXEYCANPXXAXCTGC

SEQ ID NO: 8478 - protein, 17 aa, Artificial Sequence
  Synthetically generated peptide
  VARIANT (1)..(17): Xaa = Any Amino Acid
ACXEYCANPXXACXTGC

SEQ ID NO: 8479 - protein, 17 aa, Artificial Sequence
  Synthetically generated peptide
  VARIANT (1)..(17): Xaa = Any Amino Acid
ACXEYCANPXXACTXGC

SEQ ID NO: 8480 - protein, 17 aa, Artificial Sequence
  Synthetically generated peptide
  VARIANT (1)..(17): Xaa = Any Amino Acid
ACXEYCANPXXACTGXC

SEQ ID NO: 8481 - protein, 16 aa, Artificial Sequence
  Synthetically generated peptide
  VARIANT (1)..(16): Xaa = Any Amino Acid
ACXEYCANPXAXCTGC

SEQ ID NO: 8482 - protein, 17 aa, Artificial Sequence
  Synthetically generated peptide
  VARIANT (1)..(17): Xaa = Any Amino Acid
ACXEYCANPXAXXCTGC

SEQ ID NO: 8483 - protein, 17 aa, Artificial Sequence
  Synthetically generated peptide
  VARIANT (1)..(17): Xaa = Any Amino Acid
ACXEYCANPXAXCXTGC

SEQ ID NO: 8484 - protein, 17 aa, Artificial Sequence
  Synthetically generated peptide
  VARIANT (1)..(17): Xaa = Any Amino Acid
ACXEYCANPXAXCTXGC

SEQ ID NO: 8485 - protein, 17 aa, Artificial Sequence
  Synthetically generated peptide
  VARIANT (1)..(17): Xaa = Any Amino Acid
ACXEYCANPXAXCTGXC

SEQ ID NO: 8486 - protein, 16 aa, Artificial Sequence
  Synthetically generated peptide
  VARIANT (1)..(16): Xaa = Any Amino Acid
ACXEYCANPXACXTGC

SEQ ID NO: 8487 - protein, 17 aa, Artificial Sequence
  Synthetically generated peptide
  VARIANT (1)..(17): Xaa = Any Amino Acid
ACXEYCANPXACXXTGC

SEQ ID NO: 8488 - protein, 17 aa, Artificial Sequence
  Synthetically generated peptide
  VARIANT (1)..(17): Xaa = Any Amino Acid
ACXEYCANPXACXTXGC

SEQ ID NO: 8489 - protein, 17 aa, Artificial Sequence
  Synthetically generated peptide
  VARIANT (1)..(17): Xaa = Any Amino Acid
ACXEYCANPXACXTGXC

SEQ ID NO: 8490 - protein, 16 aa, Artificial Sequence
  Synthetically generated peptide
  VARIANT (1)..(16): Xaa = Any Amino Acid
ACXEYCANPXACTXGC

SEQ ID NO: 8491 - protein, 17 aa, Artificial Sequence
  Synthetically generated peptide
  VARIANT (1)..(17): Xaa = Any Amino Acid
ACXEYCANPXACTXXGC

SEQ ID NO: 8492 - protein, 17 aa, Artificial Sequence
  Synthetically generated peptide
  VARIANT (1)..(17): Xaa = Any Amino Acid
ACXEYCANPXACTXGXC

SEQ ID NO: 8493 - protein, 16 aa, Artificial Sequence
  Synthetically generated peptide
  VARIANT (1)..(16): Xaa = Any Amino Acid
ACXEYCANPXACTGXC

SEQ ID NO: 8494 - protein, 17 aa, Artificial Sequence
  Synthetically generated peptide
  VARIANT (1)..(17): Xaa = Any Amino Acid
ACXEYCANPXACTGXXC

SEQ ID NO: 8495 - protein, 15 aa, Artificial Sequence
  Synthetically generated peptide
  VARIANT (1)..(15): Xaa = Any Amino Acid
ACXEYCANPAXCTGC

SEQ ID NO: 8496 - protein, 16 aa, Artificial Sequence
  Synthetically generated peptide
  VARIANT (1)..(16): Xaa = Any Amino Acid
ACXEYCANPAXXCTGC

SEQ ID NO: 8497 - protein, 17 aa, Artificial Sequence
  Synthetically generated peptide
  VARIANT (1)..(17): Xaa = Any Amino Acid
ACXEYCANPAXXXCTGC

SEQ ID NO: 8498 - protein, 17 aa, Artificial Sequence
  Synthetically generated peptide
  VARIANT (1)..(17): Xaa = Any Amino Acid
ACXEYCANPAXXCXTGC

SEQ ID NO: 8499 - protein, 17 aa, Artificial Sequence
  Synthetically generated peptide
  VARIANT (1)..(17): Xaa = Any Amino Acid
ACXEYCANPAXXCTXGC

SEQ ID NO: 8500 - protein, 17 aa, Artificial Sequence
  Synthetically generated peptide
  VARIANT (1)..(17): Xaa = Any Amino Acid
ACXEYCANPAXXCTGXC

SEQ ID NO: 8501 - protein, 16 aa, Artificial Sequence
  Synthetically generated peptide
  VARIANT (1)..(16): Xaa = Any Amino Acid
ACXEYCANPAXCXTGC

SEQ ID NO: 8502 - protein, 17 aa, Artificial Sequence
  Synthetically generated peptide
  VARIANT (1)..(17): Xaa = Any Amino Acid
ACXEYCANPAXCXXTGC

SEQ ID NO: 8503 - protein, 17 aa, Artificial Sequence
  Synthetically generated peptide
  VARIANT (1)..(17): Xaa = Any Amino Acid
ACXEYCANPAXCXTXGC

SEQ ID NO: 8504 - protein, 17 aa, Artificial Sequence
  Synthetically generated peptide
  VARIANT (1)..(17): Xaa = Any Amino Acid
ACXEYCANPAXCXTGXC

SEQ ID NO: 8505 - protein, 16 aa, Artificial Sequence
  Synthetically generated peptide
  VARIANT (1)..(16): Xaa = Any Amino Acid
ACXEYCANPAXCTXGC

SEQ ID NO: 8506 - protein, 17 aa, Artificial Sequence
  Synthetically generated peptide
  VARIANT (1)..(17): Xaa = Any Amino Acid
ACXEYCANPAXCTXXGC

SEQ ID NO: 8507 - protein, 17 aa, Artificial Sequence
  Synthetically generated peptide
  VARIANT (1)..(17): Xaa = Any Amino Acid
ACXEYCANPAXCTXGXC

SEQ ID NO: 8508 - protein, 16 aa, Artificial Sequence
  Synthetically generated peptide
  VARIANT (1)..(16): Xaa = Any Amino Acid
ACXEYCANPAXCTGXC

SEQ ID NO: 8509 - protein, 17 aa, Artificial Sequence
  Synthetically generated peptide
  VARIANT (1)..(17): Xaa = Any Amino Acid
ACXEYCANPAXCTGXXC

SEQ ID NO: 8510 - protein, 15 aa, Artificial Sequence
  Synthetically generated peptide
  VARIANT (1)..(15): Xaa = Any Amino Acid
ACXEYCANPACXTGC

SEQ ID NO: 8511 - protein, 16 aa, Artificial Sequence
  Synthetically generated peptide
  VARIANT (1)..(16): Xaa = Any Amino Acid
ACXEYCANPACXXTGC

SEQ ID NO: 8512 - protein, 17 aa, Artificial Sequence
  Synthetically generated peptide
  VARIANT (1)..(17): Xaa = Any Amino Acid
ACXEYCANPACXXXTGC

SEQ ID NO: 8513 - protein, 17 aa, Artificial Sequence
  Synthetically generated peptide
  VARIANT (1)..(17): Xaa = Any Amino Acid
ACXEYCANPACXXTXGC

SEQ ID NO: 8514 - protein, 17 aa, Artificial Sequence
  Synthetically generated peptide
  VARIANT (1)..(17): Xaa = Any Amino Acid
ACXEYCANPACXXTGXC

SEQ ID NO: 8515 - protein, 16 aa, Artificial Sequence
  Synthetically generated peptide
  VARIANT (1)..(16): Xaa = Any Amino Acid
ACXEYCANPACXTXGC

SEQ ID NO: 8516 - protein, 17 aa, Artificial Sequence
  Synthetically generated peptide
  VARIANT (1)..(17): Xaa = Any Amino Acid
ACXEYCANPACXTXXGC

SEQ ID NO: 8517 - protein, 17 aa, Artificial Sequence
  Synthetically generated peptide
  VARIANT (1)..(17): Xaa = Any Amino Acid
ACXEYCANPACXTXGXC

SEQ ID NO: 8518 - protein, 16 aa, Artificial Sequence
  Synthetically generated peptide
  VARIANT (1)..(16): Xaa = Any Amino Acid
ACXEYCANPACXTGXC

SEQ ID NO: 8519 - protein, 17 aa, Artificial Sequence
  Synthetically generated peptide
  VARIANT (1)..(17): Xaa = Any Amino Acid
ACXEYCANPACXTGXXC

SEQ ID NO: 8520 - protein, 15 aa, Artificial Sequence
  Synthetically generated peptide
  VARIANT (1)..(15): Xaa = Any Amino Acid
ACXEYCANPACTXGC

SEQ ID NO: 8521 - protein, 16 aa, Artificial Sequence
  Synthetically generated peptide
  VARIANT (1)..(16): Xaa = Any Amino Acid
ACXEYCANPACTXXGC

SEQ ID NO: 8522 - protein, 17 aa, Artificial Sequence
  Synthetically generated peptide
  VARIANT (1)..(17): Xaa = Any Amino Acid
ACXEYCANPACTXXXGC

SEQ ID NO: 8523 - protein, 17 aa, Artificial Sequence
  Synthetically generated peptide
  VARIANT (1)..(17): Xaa = Any Amino Acid
ACXEYCANPACTXXGXC

SEQ ID NO: 8524 - protein, 16 aa, Artificial Sequence
  Synthetically generated peptide
  VARIANT (1)..(16): Xaa = Any Amino Acid
ACXEYCANPACTXGXC

SEQ ID NO: 8525 - protein, 17 aa, Artificial Sequence
  Synthetically generated peptide
  VARIANT (1)..(17): Xaa = Any Amino Acid
ACXEYCANPACTXGXXC

SEQ ID NO: 8526 - protein, 15 aa, Artificial Sequence
  Synthetically generated peptide
  VARIANT (1)..(15): Xaa = Any Amino Acid
ACXEYCANPACTGXC

SEQ ID NO: 8527 - protein, 16 aa, Artificial Sequence
  Synthetically generated peptide
  VARIANT (1)..(16): Xaa = Any Amino Acid
ACXEYCANPACTGXXC

SEQ ID NO: 8528 - protein, 17 aa, Artificial Sequence
  Synthetically generated peptide
  VARIANT (1)..(17): Xaa = Any Amino Acid
ACXEYCANPACTGXXXC

SEQ ID NO: 8529 - protein, 14 aa, Artificial Sequence
  Synthetically generated peptide
  VARIANT (1)..(14): Xaa = Any Amino Acid
ACEXYCANPACTGC

SEQ ID NO: 8530 - protein, 15 aa, Artificial Sequence
  Synthetically generated peptide
  VARIANT (1)..(15): Xaa = Any Amino Acid
ACEXXYCANPACTGC

SEQ ID NO: 8531 - protein, 16 aa, Artificial Sequence
  Synthetically generated peptide
  VARIANT (1)..(16): Xaa = Any Amino Acid
ACEXXXYCANPACTGC

SEQ ID NO: 8532 - protein, 17 aa, Artificial Sequence
  Synthetically generated peptide
  VARIANT (1)..(17): Xaa = Any Amino Acid
ACEXXXXYCANPACTGC

SEQ ID NO: 8533 - protein, 17 aa, Artificial Sequence
  Synthetically generated peptide
  VARIANT (1)..(17): Xaa = Any Amino Acid
ACEXXXYXCANPACTGC

SEQ ID NO: 8534 - protein, 17 aa, Artificial Sequence
  Synthetically generated peptide
  VARIANT (1)..(17): Xaa = Any Amino Acid
ACEXXXYCAXNPACTGC

SEQ ID NO: 8535 - protein, 17 aa, Artificial Sequence
  Synthetically generated peptide
  VARIANT (1)..(17): Xaa = Any Amino Acid
ACEXXXYCANXPACTGC

SEQ ID NO: 8536 - protein, 17 aa, Artificial Sequence
  Synthetically generated peptide
  VARIANT (1)..(17): Xaa = Any Amino Acid
ACEXXXYCANPXACTGC

SEQ ID NO: 8537 - protein, 17 aa, Artificial Sequence
  Synthetically generated peptide
  VARIANT (1)..(17): Xaa = Any Amino Acid
ACEXXXYCANPAXCTGC

SEQ ID NO: 8538 - protein, 17 aa, Artificial Sequence
  Synthetically generated peptide
  VARIANT (1)..(17): Xaa = Any Amino Acid
ACEXXXYCANPACXTGC

SEQ ID NO: 8539 - protein, 17 aa, Artificial Sequence
  Synthetically generated peptide
  VARIANT (1)..(17): Xaa = Any Amino Acid
ACEXXXYCANPACTXGC

SEQ ID NO: 8540 - protein, 17 aa, Artificial Sequence
  Synthetically generated peptide
  VARIANT (1)..(17): Xaa = Any Amino Acid
ACEXXXYCANPACTGXC

SEQ ID NO: 8541 - protein, 16 aa, Artificial Sequence
  Synthetically generated peptide
  VARIANT (1)..(16): Xaa = Any Amino Acid
ACEXXYXCANPACTGC

SEQ ID NO: 8542 - protein, 17 aa, Artificial Sequence
  Synthetically generated peptide
  VARIANT (1)..(17): Xaa = Any Amino Acid
ACEXXYXXCANPACTGC

SEQ ID NO: 8543 - protein, 17 aa, Artificial Sequence
  Synthetically generated peptide
  VARIANT (1)..(17): Xaa = Any Amino Acid
ACEXXYXCAXNPACTGC

SEQ ID NO: 8544 - protein, 17 aa, Artificial Sequence
  Synthetically generated peptide
  VARIANT (1)..(17): Xaa = Any Amino Acid
ACEXXYXCANXPACTGC

SEQ ID NO: 8545 - protein, 17 aa, Artificial Sequence
  Synthetically generated peptide
  VARIANT (1)..(17): Xaa = Any Amino Acid
ACEXXYXCANPXACTGC

SEQ ID NO: 8546 - protein, 17 aa, Artificial Sequence
  Synthetically generated peptide
  VARIANT (1)..(17): Xaa = Any Amino Acid
ACEXXYXCANPAXCTGC

SEQ ID NO: 8547 - protein, 17 aa, Artificial Sequence
  Synthetically generated peptide
  VARIANT (1)..(17): Xaa = Any Amino Acid
ACEXXYXCANPACXTGC

SEQ ID NO: 8548 - protein, 17 aa, Artificial Sequence
  Synthetically generated peptide
  VARIANT (1)..(17): Xaa = Any Amino Acid
ACEXXYXCANPACTXGC

SEQ ID NO: 8549 - protein, 17 aa, Artificial Sequence
  Synthetically generated peptide
  VARIANT (1)..(17): Xaa = Any Amino Acid
ACEXXYXCANPACTGXC

SEQ ID NO: 8550 - protein, 16 aa, Artificial Sequence
  Synthetically generated peptide
  VARIANT (1)..(16): Xaa = Any Amino Acid
ACEXXYCAXNPACTGC

SEQ ID NO: 8551 - protein, 17 aa, Artificial Sequence
  Synthetically generated peptide
  VARIANT (1)..(17): Xaa = Any Amino Acid
ACEXXYCAXXNPACTGC

SEQ ID NO: 8552 - protein, 17 aa, Artificial Sequence
  Synthetically generated peptide
  VARIANT (1)..(17): Xaa = Any Amino Acid
ACEXXYCAXNXPACTGC

SEQ ID NO: 8553 - protein, 17 aa, Artificial Sequence
  Synthetically generated peptide
  VARIANT (1)..(17): Xaa = Any Amino Acid
ACEXXYCAXNPXACTGC

SEQ ID NO: 8554 - protein, 17 aa, Artificial Sequence
  Synthetically generated peptide
  VARIANT (1)..(17): Xaa = Any Amino Acid
ACEXXYCAXNPAXCTGC

SEQ ID NO: 8555 - protein, 17 aa, Artificial Sequence
  Synthetically generated peptide
  VARIANT (1)..(17): Xaa = Any Amino Acid
ACEXXYCAXNPACXTGC

SEQ ID NO: 8556 - protein, 17 aa, Artificial Sequence
  Synthetically generated peptide
  VARIANT (1)..(17): Xaa = Any Amino Acid
ACEXXYCAXNPACTXGC

SEQ ID NO: 8557 - protein, 17 aa, Artificial Sequence
  Synthetically generated peptide
  VARIANT (1)..(17): Xaa = Any Amino Acid
ACEXXYCAXNPACTGXC

SEQ ID NO: 8558 - protein, 16 aa, Artificial Sequence
  Synthetically generated peptide
  VARIANT (1)..(16): Xaa = Any Amino Acid
ACEXXYCANXPACTGC

SEQ ID NO: 8559 - protein, 17 aa, Artificial Sequence
  Synthetically generated peptide
  VARIANT (1)..(17): Xaa = Any Amino Acid
ACEXXYCANXXPACTGC

SEQ ID NO: 8560 - protein, 17 aa, Artificial Sequence
  Synthetically generated peptide
  VARIANT (1)..(17): Xaa = Any Amino Acid
ACEXXYCANXPXACTGC

SEQ ID NO: 8561 - protein, 17 aa, Artificial Sequence
  Synthetically generated peptide
  VARIANT (1)..(17): Xaa = Any Amino Acid
ACEXXYCANXPAXCTGC

SEQ ID NO: 8562 - protein, 17 aa, Artificial Sequence
  Synthetically generated peptide
  VARIANT (1)..(17): Xaa = Any Amino Acid
ACEXXYCANXPACXTGC

SEQ ID NO: 8563 - protein, 17 aa, Artificial Sequence
  Synthetically generated peptide
  VARIANT (1)..(17): Xaa = Any Amino Acid
ACEXXYCANXPACTXGC

SEQ ID NO: 8564 - protein, 17 aa, Artificial Sequence
  Synthetically generated peptide
  VARIANT (1)..(17): Xaa = Any Amino Acid
ACEXXYCANXPACTGXC

SEQ ID NO: 8565 - protein, 16 aa, Artificial Sequence
  Synthetically generated peptide
  VARIANT (1)..(16): Xaa = Any Amino Acid
ACEXXYCANPXACTGC

SEQ ID NO: 8566 - protein, 17 aa, Artificial Sequence
  Synthetically generated peptide
  VARIANT (1)..(17): Xaa = Any Amino Acid
ACEXXYCANPXXACTGC

SEQ ID NO: 8567 - protein, 17 aa, Artificial Sequence
  Synthetically generated peptide
  VARIANT (1)..(17): Xaa = Any Amino Acid
ACEXXYCANPXAXCTGC

SEQ ID NO: 8568 - protein, 17 aa, Artificial Sequence
  Synthetically generated peptide
  VARIANT (1)..(17): Xaa = Any Amino Acid
ACEXXYCANPXACXTGC

SEQ ID NO: 8569 - protein, 17 aa, Artificial Sequence
  Synthetically generated peptide
  VARIANT (1)..(17): Xaa = Any Amino Acid
ACEXXYCANPXACTXGC

SEQ ID NO: 8570 - protein, 17 aa, Artificial Sequence
  Synthetically generated peptide
  VARIANT (1)..(17): Xaa = Any Amino Acid
ACEXXYCANPXACTGXC

SEQ ID NO: 8571 - protein, 16 aa, Artificial Sequence
  Synthetically generated peptide
  VARIANT (1)..(16): Xaa = Any Amino Acid
ACEXXYCANPAXCTGC

SEQ ID NO: 8572 - protein, 17 aa, Artificial Sequence
  Synthetically generated peptide
  VARIANT (1)..(17): Xaa = Any Amino Acid
ACEXXYCANPAXXCTGC

SEQ ID NO: 8573 - protein, 17 aa, Artificial Sequence
  Synthetically generated peptide
  VARIANT (1)..(17): Xaa = Any Amino Acid
ACEXXYCANPAXCXTGC

SEQ ID NO: 8574 - protein, 17 aa, Artificial Sequence
  Synthetically generated peptide
  VARIANT (1)..(17): Xaa = Any Amino Acid
ACEXXYCANPAXCTXGC

SEQ ID NO: 8575 - protein, 17 aa, Artificial Sequence
  Synthetically generated peptide
  VARIANT (1)..(17): Xaa = Any Amino Acid
ACEXXYCANPAXCTGXC

SEQ ID NO: 8576 - protein, 16 aa, Artificial Sequence
  Synthetically generated peptide
  VARIANT (1)..(16): Xaa = Any Amino Acid
ACEXXYCANPACXTGC

SEQ ID NO: 8577 - protein, 17 aa, Artificial Sequence
  Synthetically generated peptide
  VARIANT (1)..(17): Xaa = Any Amino Acid
ACEXXYCANPACXXTGC

SEQ ID NO: 8578 - protein, 17 aa, Artificial Sequence
  Synthetically generated peptide
  VARIANT (1)..(17): Xaa = Any Amino Acid
ACEXXYCANPACXTXGC

SEQ ID NO: 8579 - protein, 17 aa, Artificial Sequence
  Synthetically generated peptide
  VARIANT (1)..(17): Xaa = Any Amino Acid
ACEXXYCANPACXTGXC

SEQ ID NO: 8580 - protein, 16 aa, Artificial Sequence
  Synthetically generated peptide
  VARIANT (1)..(16): Xaa = Any Amino Acid
ACEXXYCANPACTXGC

SEQ ID NO: 8581 - protein, 17 aa, Artificial Sequence
  Synthetically generated peptide
  VARIANT (1)..(17): Xaa = Any Amino Acid
ACEXXYCANPACTXXGC

SEQ ID NO: 8582 - protein, 17 aa, Artificial Sequence
  Synthetically generated peptide
  VARIANT (1)..(17): Xaa = Any Amino Acid
ACEXXYCANPACTXGXC

SEQ ID NO: 8583 - protein, 16 aa, Artificial Sequence
  Synthetically generated peptide
  VARIANT (1)..(16): Xaa = Any Amino Acid
ACEXXYCANPACTGXC

SEQ ID NO: 8584 - protein, 17 aa, Artificial Sequence
  Synthetically generated peptide
  VARIANT (1)..(17): Xaa = Any Amino Acid
ACEXXYCANPACTGXXC

SEQ ID NO: 8585 - protein, 15 aa, Artificial Sequence
  Synthetically generated peptide
  VARIANT (1)..(15): Xaa = Any Amino Acid
ACEXYXCANPACTGC

SEQ ID NO: 8586 - protein, 16 aa, Artificial Sequence
  Synthetically generated peptide
  VARIANT (1)..(16): Xaa = Any Amino Acid
ACEXYXXCANPACTGC

SEQ ID NO: 8587 - protein, 17 aa, Artificial Sequence
  Synthetically generated peptide
  VARIANT (1)..(17): Xaa = Any Amino Acid
ACEXYXXXCANPACTGC

SEQ ID NO: 8588 - protein, 17 aa, Artificial Sequence
  Synthetically generated peptide
  VARIANT (1)..(17): Xaa = Any Amino Acid
ACEXYXXCAXNPACTGC

SEQ ID NO: 8589 - protein, 17 aa, Artificial Sequence
  Synthetically generated peptide
  VARIANT (1)..(17): Xaa = Any Amino Acid
ACEXYXXCANXPACTGC

SEQ ID NO: 8590 - protein, 17 aa, Artificial Sequence
  Synthetically generated peptide
  VARIANT (1)..(17): Xaa = Any Amino Acid
ACEXYXXCANPXACTGC

SEQ ID NO: 8591 - protein, 17 aa, Artificial Sequence
  Synthetically generated peptide
  VARIANT (1)..(17): Xaa = Any Amino Acid
ACEXYXXCANPAXCTGC

SEQ ID NO: 8592 - protein, 17 aa, Artificial Sequence
  Synthetically generated peptide
  VARIANT (1)..(17): Xaa = Any Amino Acid
ACEXYXXCANPACXTGC

SEQ ID NO: 8593 - protein, 17 aa, Artificial Sequence
  Synthetically generated peptide
  VARIANT (1)..(17): Xaa = Any Amino Acid
ACEXYXXCANPACTXGC

SEQ ID NO: 8594 - protein, 17 aa, Artificial Sequence
  Synthetically generated peptide
  VARIANT (1)..(17): Xaa = Any Amino Acid
ACEXYXXCANPACTGXC

SEQ ID NO: 8595 - protein, 16 aa, Artificial Sequence
  Synthetically generated peptide
  VARIANT (1)..(16): Xaa = Any Amino Acid
ACEXYXCAXNPACTGC

SEQ ID NO: 8596 - protein, 17 aa, Artificial Sequence
  Synthetically generated peptide
  VARIANT (1)..(17): Xaa = Any Amino Acid
ACEXYXCAXXNPACTGC

SEQ ID NO: 8597 - protein, 17 aa, Artificial Sequence
  Synthetically generated peptide
  VARIANT (1)..(17): Xaa = Any Amino Acid
ACEXYXCAXNXPACTGC

SEQ ID NO: 8598 - protein, 17 aa, Artificial Sequence
  Synthetically generated peptide
  VARIANT (1)..(17): Xaa = Any Amino Acid
ACEXYXCAXNPXACTGC

SEQ ID NO: 8599 - protein, 17 aa, Artificial Sequence
  Synthetically generated peptide
  VARIANT (1)..(17): Xaa = Any Amino Acid
ACEXYXCAXNPAXCTGC

SEQ ID NO: 8600 - protein, 17 aa, Artificial Sequence
  Synthetically generated peptide
  VARIANT (1)..(17): Xaa = Any Amino Acid
ACEXYXCAXNPACXTGC

SEQ ID NO: 8601 - protein, 17 aa, Artificial Sequence
  Synthetically generated peptide
  VARIANT (1)..(17): Xaa = Any Amino Acid
ACEXYXCAXNPACTXGC

SEQ ID NO: 8602 - protein, 17 aa, Artificial Sequence
  Synthetically generated peptide
  VARIANT (1)..(17): Xaa = Any Amino Acid
ACEXYXCAXNPACTGXC

SEQ ID NO: 8603 - protein, 16 aa, Artificial Sequence
  Synthetically generated peptide
  VARIANT (1)..(16): Xaa = Any Amino Acid
ACEXYXCANXPACTGC

SEQ ID NO: 8604 - protein, 17 aa, Artificial Sequence
  Synthetically generated peptide
  VARIANT (1)..(17): Xaa = Any Amino Acid
ACEXYXCANXXPACTGC

SEQ ID NO: 8605 - protein, 17 aa, Artificial Sequence
  Synthetically generated peptide
  VARIANT (1)..(17): Xaa = Any Amino Acid
ACEXYXCANXPXACTGC

SEQ ID NO: 8606 - protein, 17 aa, Artificial Sequence
  Synthetically generated peptide
  VARIANT (1)..(17): Xaa = Any Amino Acid
ACEXYXCANXPAXCTGC

SEQ ID NO: 8607 - protein, 17 aa, Artificial Sequence
  Synthetically generated peptide
  VARIANT (1)..(17): Xaa = Any Amino Acid
ACEXYXCANXPACXTGC

SEQ ID NO: 8608 - protein, 17 aa, Artificial Sequence
  Synthetically generated peptide
  VARIANT (1)..(17): Xaa = Any Amino Acid
ACEXYXCANXPACTXGC

SEQ ID NO: 8609 - protein, 17 aa, Artificial Sequence
  Synthetically generated peptide
  VARIANT (1)..(17): Xaa = Any Amino Acid
ACEXYXCANXPACTGXC

SEQ ID NO: 8610 - protein, 16 aa, Artificial Sequence
  Synthetically generated peptide
  VARIANT (1)..(16): Xaa = Any Amino Acid
ACEXYXCANPXACTGC

SEQ ID NO: 8611 - protein, 17 aa, Artificial Sequence
  Synthetically generated peptide
  VARIANT (1)..(17): Xaa = Any Amino Acid
ACEXYXCANPXXACTGC

SEQ ID NO: 8612 - protein, 17 aa, Artificial Sequence
  Synthetically generated peptide
  VARIANT (1)..(17): Xaa = Any Amino Acid
ACEXYXCANPXAXCTGC

SEQ ID NO: 8613 - protein, 17 aa, Artificial Sequence
  Synthetically generated peptide
  VARIANT (1)..(17): Xaa = Any Amino Acid
ACEXYXCANPXACXTGC

SEQ ID NO: 8614 - protein, 17 aa, Artificial Sequence
  Synthetically generated peptide
  VARIANT (1)..(17): Xaa = Any Amino Acid
ACEXYXCANPXACTXGC

SEQ ID NO: 8615 - protein, 17 aa, Artificial Sequence
  Synthetically generated peptide
  VARIANT (1)..(17): Xaa = Any Amino Acid
ACEXYXCANPXACTGXC

SEQ ID NO: 8616 - protein, 16 aa, Artificial Sequence
  Synthetically generated peptide
  VARIANT (1)..(16): Xaa = Any Amino Acid
ACEXYXCANPAXCTGC

SEQ ID NO: 8617 - protein, 17 aa, Artificial Sequence
  Synthetically generated peptide
  VARIANT (1)..(17): Xaa = Any Amino Acid
ACEXYXCANPAXXCTGC

SEQ ID NO: 8618 - protein, 17 aa, Artificial Sequence
  Synthetically generated peptide
  VARIANT (1)..(17): Xaa = Any Amino Acid
ACEXYXCANPAXCXTGC

SEQ ID NO: 8619 - protein, 17 aa, Artificial Sequence
  Synthetically generated peptide
  VARIANT (1)..(17): Xaa = Any Amino Acid
ACEXYXCANPAXCTXGC

SEQ ID NO: 8620 - protein, 17 aa, Artificial Sequence
  Synthetically generated peptide
  VARIANT (1)..(17): Xaa = Any Amino Acid
ACEXYXCANPAXCTGXC

SEQ ID NO: 8621 - protein, 16 aa, Artificial Sequence
  Synthetically generated peptide
  VARIANT (1)..(16): Xaa = Any Amino Acid
ACEXYXCANPACXTGC

SEQ ID NO: 8622 - protein, 17 aa, Artificial Sequence
  Synthetically generated peptide
  VARIANT (1)..(17): Xaa = Any Amino Acid
ACEXYXCANPACXXTGC

SEQ ID NO: 8623 - protein, 17 aa, Artificial Sequence
  Synthetically generated peptide
  VARIANT (1)..(17): Xaa = Any Amino Acid
ACEXYXCANPACXTXGC

SEQ ID NO: 8624 - protein, 17 aa, Artificial Sequence
  Synthetically generated peptide
  VARIANT (1)..(17): Xaa = Any Amino Acid
ACEXYXCANPACXTGXC

SEQ ID NO: 8625 - protein, 16 aa, Artificial Sequence
  Synthetically generated peptide
  VARIANT (1)..(16): Xaa = Any Amino Acid
ACEXYXCANPACTXGC

SEQ ID NO: 8626 - protein, 17 aa, Artificial Sequence
  Synthetically generated peptide
  VARIANT (1)..(17): Xaa = Any Amino Acid
ACEXYXCANPACTXXGC

SEQ ID NO: 8627 - protein, 17 aa, Artificial Sequence
  Synthetically generated peptide
  VARIANT (1)..(17): Xaa = Any Amino Acid
ACEXYXCANPACTXGXC

SEQ ID NO: 8628 - protein, 16 aa, Artificial Sequence
  Synthetically generated peptide
  VARIANT (1)..(16): Xaa = Any Amino Acid
ACEXYXCANPACTGXC

SEQ ID NO: 8629 - protein, 17 aa, Artificial Sequence
  Synthetically generated peptide
  VARIANT (1)..(17): Xaa = Any Amino Acid
ACEXYXCANPACTGXXC

SEQ ID NO: 8630 - protein, 15 aa, Artificial Sequence
  Synthetically generated peptide
  VARIANT (1)..(15): Xaa = Any Amino Acid
ACEXYCAXNPACTGC

SEQ ID NO: 8631 - protein, 16 aa, Artificial Sequence
  Synthetically generated peptide
  VARIANT (1)..(16): Xaa = Any Amino Acid
ACEXYCAXXNPACTGC

SEQ ID NO: 8632 - protein, 17 aa, Artificial Sequence
  Synthetically generated peptide
  VARIANT (1)..(17): Xaa = Any Amino Acid
ACEXYCAXXXNPACTGC

SEQ ID NO: 8633 - protein, 17 aa, Artificial Sequence
  Synthetically generated peptide
  VARIANT (1)..(17): Xaa = Any Amino Acid
ACEXYCAXXNXPACTGC

SEQ ID NO: 8634 - protein, 17 aa, Artificial Sequence
  Synthetically generated peptide
  VARIANT (1)..(17): Xaa = Any Amino Acid
ACEXYCAXXNPXACTGC

SEQ ID NO: 8635 - protein, 17 aa, Artificial Sequence
  Synthetically generated peptide
  VARIANT (1)..(17): Xaa = Any Amino Acid
ACEXYCAXXNPAXCTGC

SEQ ID NO: 8636 - protein, 17 aa, Artificial Sequence
  Synthetically generated peptide
  VARIANT (1)..(17): Xaa = Any Amino Acid
ACEXYCAXXNPACXTGC

SEQ ID NO: 8637 - protein, 17 aa, Artificial Sequence
  Synthetically generated peptide
  VARIANT (1)..(17): Xaa = Any Amino Acid
ACEXYCAXXNPACTXGC

SEQ ID NO: 8638 - protein, 17 aa, Artificial Sequence
  Synthetically generated peptide
  VARIANT (1)..(17): Xaa = Any Amino Acid
ACEXYCAXXNPACTGXC

SEQ ID NO: 8639 - protein, 16 aa, Artificial Sequence
  Synthetically generated peptide
  VARIANT (1)..(16): Xaa = Any Amino Acid
ACEXYCAXNXPACTGC

SEQ ID NO: 8640 - protein, 17 aa, Artificial Sequence
  Synthetically generated peptide
  VARIANT (1)..(17): Xaa = Any Amino Acid
ACEXYCAXNXXPACTGC

SEQ ID NO: 8641 - protein, 17 aa, Artificial Sequence
  Synthetically generated peptide
  VARIANT (1)..(17): Xaa = Any Amino Acid
ACEXYCAXNXPXACTGC

SEQ ID NO: 8642 - protein, 17 aa, Artificial Sequence
  Synthetically generated peptide
  VARIANT (1)..(17): Xaa = Any Amino Acid
ACEXYCAXNXPAXCTGC

SEQ ID NO: 8643 - protein, 17 aa, Artificial Sequence
  Synthetically generated peptide
  VARIANT (1)..(17): Xaa = Any Amino Acid
ACEXYCAXNXPACXTGC

SEQ ID NO: 8644 - protein, 17 aa, Artificial Sequence
  Synthetically generated peptide
  VARIANT (1)..(17): Xaa = Any Amino Acid
ACEXYCAXNXPACTXGC

SEQ ID NO: 8645 - protein, 17 aa, Artificial Sequence
  Synthetically generated peptide
  VARIANT (1)..(17): Xaa = Any Amino Acid
ACEXYCAXNXPACTGXC

SEQ ID NO: 8646 - protein, 16 aa, Artificial Sequence
  Synthetically generated peptide
  VARIANT (1)..(16): Xaa = Any Amino Acid
ACEXYCAXNPXACTGC

SEQ ID NO: 8647 - protein, 17 aa, Artificial Sequence
  Synthetically generated peptide
  VARIANT (1)..(17): Xaa = Any Amino Acid
ACEXYCAXNPXXACTGC

SEQ ID NO: 8648 - protein, 17 aa, Artificial Sequence
  Synthetically generated peptide
  VARIANT (1)..(17): Xaa = Any Amino Acid
ACEXYCAXNPXAXCTGC

SEQ ID NO: 8649 - protein, 17 aa, Artificial Sequence
  Synthetically generated peptide
  VARIANT (1)..(17): Xaa = Any Amino Acid
ACEXYCAXNPXACXTGC

SEQ ID NO: 8650 - protein, 17 aa, Artificial Sequence
  Synthetically generated peptide
  VARIANT (1)..(17): Xaa = Any Amino Acid
ACEXYCAXNPXACTXGC

SEQ ID NO: 8651 - protein, 17 aa, Artificial Sequence
  Synthetically generated peptide
  VARIANT (1)..(17): Xaa = Any Amino Acid
ACEXYCAXNPXACTGXC

SEQ ID NO: 8652 - protein, 16 aa, Artificial Sequence
  Synthetically generated peptide
  VARIANT (1)..(16): Xaa = Any Amino Acid
ACEXYCAXNPAXCTGC

SEQ ID NO: 8653 - protein, 17 aa, Artificial Sequence
  Synthetically generated peptide
  VARIANT (1)..(17): Xaa = Any Amino Acid
ACEXYCAXNPAXXCTGC

SEQ ID NO: 8654 - protein, 17 aa, Artificial Sequence
  Synthetically generated peptide
  VARIANT (1)..(17): Xaa = Any Amino Acid
ACEXYCAXNPAXCXTGC

SEQ ID NO: 8655 - protein, 17 aa, Artificial Sequence
  Synthetically generated peptide
  VARIANT (1)..(17): Xaa = Any Amino Acid
ACEXYCAXNPAXCTXGC

SEQ ID NO: 8656 - protein, 17 aa, Artificial Sequence
  Synthetically generated peptide
  VARIANT (1)..(17): Xaa = Any Amino Acid
ACEXYCAXNPAXCTGXC

SEQ ID NO: 8657 - protein, 16 aa, Artificial Sequence
  Synthetically generated peptide
  VARIANT (1)..(16): Xaa = Any Amino Acid
ACEXYCAXNPACXTGC

SEQ ID NO: 8658 - protein, 17 aa, Artificial Sequence
  Synthetically generated peptide
  VARIANT (1)..(17): Xaa = Any Amino Acid
ACEXYCAXNPACXXTGC

SEQ ID NO: 8659 - protein, 17 aa, Artificial Sequence
  Synthetically generated peptide
  VARIANT (1)..(17): Xaa = Any Amino Acid
ACEXYCAXNPACXTXGC

SEQ ID NO: 8660 - protein, 17 aa, Artificial Sequence
  Synthetically generated peptide
  VARIANT (1)..(17): Xaa = Any Amino Acid
ACEXYCAXNPACXTGXC

SEQ ID NO: 8661 - protein, 16 aa, Artificial Sequence
  Synthetically generated peptide
  VARIANT (1)..(16): Xaa = Any Amino Acid
ACEXYCAXNPACTXGC

SEQ ID NO: 8662 - protein, 17 aa, Artificial Sequence
  Synthetically generated peptide
  VARIANT (1)..(17): Xaa = Any Amino Acid
ACEXYCAXNPACTXXGC

SEQ ID NO: 8663 - protein, 17 aa, Artificial Sequence
  Synthetically generated peptide
  VARIANT (1)..(17): Xaa = Any Amino Acid
ACEXYCAXNPACTXGXC

SEQ ID NO: 8664 - protein, 16 aa, Artificial Sequence
  Synthetically generated peptide
  VARIANT (1)..(16): Xaa = Any Amino Acid
ACEXYCAXNPACTGXC

SEQ ID NO: 8665 - protein, 17 aa, Artificial Sequence
  Synthetically generated peptide
  VARIANT (1)..(17): Xaa = Any Amino Acid
ACEXYCAXNPACTGXXC

SEQ ID NO: 8666 - protein, 15 aa, Artificial Sequence
  Synthetically generated peptide
  VARIANT (1)..(15): Xaa = Any Amino Acid
ACEXYCANXPACTGC

SEQ ID NO: 8667 - protein, 16 aa, Artificial Sequence
  Synthetically generated peptide
  VARIANT (1)..(16): Xaa = Any Amino Acid
ACEXYCANXXPACTGC

SEQ ID NO: 8668 - protein, 17 aa, Artificial Sequence
  Synthetically generated peptide
  VARIANT (1)..(17): Xaa = Any Amino Acid
ACEXYCANXXXPACTGC

SEQ ID NO: 8669 - protein, 17 aa, Artificial Sequence
  Synthetically generated peptide
  VARIANT (1)..(17): Xaa = Any Amino Acid
ACEXYCANXXPXACTGC

SEQ ID NO: 8670 - protein, 17 aa, Artificial Sequence
  Synthetically generated peptide
  VARIANT (1)..(17): Xaa = Any Amino Acid
ACEXYCANXXPAXCTGC

SEQ ID NO: 8671 - protein, 17 aa, Artificial Sequence
  Synthetically generated peptide
  VARIANT (1)..(17): Xaa = Any Amino Acid
ACEXYCANXXPACXTGC

SEQ ID NO: 8672 - protein, 17 aa, Artificial Sequence
  Synthetically generated peptide
  VARIANT (1)..(17): Xaa = Any Amino Acid
ACEXYCANXXPACTXGC

SEQ ID NO: 8673 - protein, 17 aa, Artificial Sequence
  Synthetically generated peptide
  VARIANT (1)..(17): Xaa = Any Amino Acid
ACEXYCANXXPACTGXC

SEQ ID NO: 8674 - protein, 16 aa, Artificial Sequence
  Synthetically generated peptide
  VARIANT (1)..(16): Xaa = Any Amino Acid
ACEXYCANXPXACTGC

SEQ ID NO: 8675 - protein, 17 aa, Artificial Sequence
  Synthetically generated peptide
  VARIANT (1)..(17): Xaa = Any Amino Acid
ACEXYCANXPXXACTGC

SEQ ID NO: 8676 - protein, 17 aa, Artificial Sequence
  Synthetically generated peptide
  VARIANT (1)..(17): Xaa = Any Amino Acid
ACEXYCANXPXAXCTGC

SEQ ID NO: 8677 - protein, 17 aa, Artificial Sequence
  Synthetically generated peptide
  VARIANT (1)..(17): Xaa = Any Amino Acid
ACEXYCANXPXACXTGC

SEQ ID NO: 8678 - protein, 17 aa, Artificial Sequence
  Synthetically generated peptide
  VARIANT (1)..(17): Xaa = Any Amino Acid
ACEXYCANXPXACTXGC

SEQ ID NO: 8679 - protein, 17 aa, Artificial Sequence
  Synthetically generated peptide
  VARIANT (1)..(17): Xaa = Any Amino Acid
ACEXYCANXPXACTGXC

SEQ ID NO: 8680 - protein, 16 aa, Artificial Sequence
  Synthetically generated peptide
  VARIANT (1)..(16): Xaa = Any Amino Acid
ACEXYCANXPAXCTGC

SEQ ID NO: 8681 - protein, 17 aa, Artificial Sequence
  Synthetically generated peptide
  VARIANT (1)..(17): Xaa = Any Amino Acid
ACEXYCANXPAXXCTGC

SEQ ID NO: 8682 - protein, 17 aa, Artificial Sequence
  Synthetically generated peptide
  VARIANT (1)..(17): Xaa = Any Amino Acid
ACEXYCANXPAXCXTGC

SEQ ID NO: 8683 - protein, 17 aa, Artificial Sequence
  Synthetically generated peptide
  VARIANT (1)..(17): Xaa = Any Amino Acid
ACEXYCANXPAXCTXGC

SEQ ID NO: 8684 - protein, 17 aa, Artificial Sequence
  Synthetically generated peptide
  VARIANT (1)..(17): Xaa = Any Amino Acid
ACEXYCANXPAXCTGXC

SEQ ID NO: 8685 - protein, 16 aa, Artificial Sequence
  Synthetically generated peptide
  VARIANT (1)..(16): Xaa = Any Amino Acid
ACEXYCANXPACXTGC

SEQ ID NO: 8686 - protein, 17 aa, Artificial Sequence
  Synthetically generated peptide
  VARIANT (1)..(17): Xaa = Any Amino Acid
ACEXYCANXPACXXTGC

SEQ ID NO: 8687 - protein, 17 aa, Artificial Sequence
  Synthetically generated peptide
  VARIANT (1)..(17): Xaa = Any Amino Acid
ACEXYCANXPACXTXGC

SEQ ID NO: 8688 - protein, 17 aa, Artificial Sequence
  Synthetically generated peptide
  VARIANT (1)..(17): Xaa = Any Amino Acid
ACEXYCANXPACXTGXC

SEQ ID NO: 8689 - protein, 16 aa, Artificial Sequence
  Synthetically generated peptide
  VARIANT (1)..(16): Xaa = Any Amino Acid
ACEXYCANXPACTXGC

SEQ ID NO: 8690 - protein, 17 aa, Artificial Sequence
  Synthetically generated peptide
  VARIANT (1)..(17): Xaa = Any Amino Acid
ACEXYCANXPACTXXGC

SEQ ID NO: 8691 - protein, 17 aa, Artificial Sequence
  Synthetically generated peptide
  VARIANT (1)..(17): Xaa = Any Amino Acid
ACEXYCANXPACTXGXC

SEQ ID NO: 8692 - protein, 16 aa, Artificial Sequence
  Synthetically generated peptide
  VARIANT (1)..(16): Xaa = Any Amino Acid
ACEXYCANXPACTGXC

SEQ ID NO: 8693 - protein, 17 aa, Artificial Sequence
  Synthetically generated peptide
  VARIANT (1)..(17): Xaa = Any Amino Acid
ACEXYCANXPACTGXXC

SEQ ID NO: 8694 - protein, 15 aa, Artificial Sequence
  Synthetically generated peptide
  VARIANT (1)..(15): Xaa = Any Amino Acid
ACEXYCANPXACTGC

SEQ ID NO: 8695 - protein, 16 aa, Artificial Sequence
  Synthetically generated peptide
  VARIANT (1)..(16): Xaa = Any Amino Acid
ACEXYCANPXXACTGC

SEQ ID NO: 8696 - protein, 17 aa, Artificial Sequence
  Synthetically generated peptide
  VARIANT (1)..(17): Xaa = Any Amino Acid
ACEXYCANPXXXACTGC

SEQ ID NO: 8697 - protein, 17 aa, Artificial Sequence
  Synthetically generated peptide
  VARIANT (1)..(17): Xaa = Any Amino Acid
ACEXYCANPXXAXCTGC

SEQ ID NO: 8698 - protein, 17 aa, Artificial Sequence
  Synthetically generated peptide
  VARIANT (1)..(17): Xaa = Any Amino Acid
ACEXYCANPXXACXTGC

SEQ ID NO: 8699 - protein, 17 aa, Artificial Sequence
  Synthetically generated peptide
  VARIANT (1)..(17): Xaa = Any Amino Acid
ACEXYCANPXXACTXGC

SEQ ID NO: 8700 - protein, 17 aa, Artificial Sequence
  Synthetically generated peptide
  VARIANT (1)..(17): Xaa = Any Amino Acid
ACEXYCANPXXACTGXC

SEQ ID NO: 8701 - protein, 16 aa, Artificial Sequence
  Synthetically generated peptide
  VARIANT (1)..(16): Xaa = Any Amino Acid
ACEXYCANPXAXCTGC

SEQ ID NO: 8702 - protein, 17 aa, Artificial Sequence
  Synthetically generated peptide
  VARIANT (1)..(17): Xaa = Any Amino Acid
ACEXYCANPXAXXCTGC

SEQ ID NO: 8703 - protein, 17 aa, Artificial Sequence
  Synthetically generated peptide
  VARIANT (1)..(17): Xaa = Any Amino Acid
ACEXYCANPXAXCXTGC

SEQ ID NO: 8704 - protein, 17 aa, Artificial Sequence
  Synthetically generated peptide
  VARIANT (1)..(17): Xaa = Any Amino Acid
ACEXYCANPXAXCTXGC

SEQ ID NO: 8705 - protein, 17 aa, Artificial Sequence
  Synthetically generated peptide
  VARIANT (1)..(17): Xaa = Any Amino Acid
ACEXYCANPXAXCTGXC

SEQ ID NO: 8706 - protein, 16 aa, Artificial Sequence
  Synthetically generated peptide
  VARIANT (1)..(16): Xaa = Any Amino Acid
ACEXYCANPXACXTGC

SEQ ID NO: 8707 - protein, 17 aa, Artificial Sequence
  Synthetically generated peptide
  VARIANT (1)..(17): Xaa = Any Amino Acid
ACEXYCANPXACXXTGC

SEQ ID NO: 8708 - protein, 17 aa, Artificial Sequence
  Synthetically generated peptide
  VARIANT (1)..(17): Xaa = Any Amino Acid
ACEXYCANPXACXTXGC

SEQ ID NO: 8709 - protein, 17 aa, Artificial Sequence
  Synthetically generated peptide
  VARIANT (1)..(17): Xaa = Any Amino Acid
ACEXYCANPXACXTGXC

SEQ ID NO: 8710 - protein, 16 aa, Artificial Sequence
  Synthetically generated peptide
  VARIANT (1)..(16): Xaa = Any Amino Acid
ACEXYCANPXACTXGC

SEQ ID NO: 8711 - protein, 17 aa, Artificial Sequence
  Synthetically generated peptide
  VARIANT (1)..(17): Xaa = Any Amino Acid
ACEXYCANPXACTXXGC

SEQ ID NO: 8712 - protein, 17 aa, Artificial Sequence
  Synthetically generated peptide
  VARIANT (1)..(17): Xaa = Any Amino Acid
ACEXYCANPXACTXGXC

SEQ ID NO: 8713 - protein, 16 aa, Artificial Sequence
  Synthetically generated peptide
  VARIANT (1)..(16): Xaa = Any Amino Acid
ACEXYCANPXACTGXC

SEQ ID NO: 8714 - protein, 17 aa, Artificial Sequence
  Synthetically generated peptide
  VARIANT (1)..(17): Xaa = Any Amino Acid
ACEXYCANPXACTGXXC

SEQ ID NO: 8715 - protein, 15 aa, Artificial Sequence
  Synthetically generated peptide
  VARIANT (1)..(15): Xaa = Any Amino Acid
ACEXYCANPAXCTGC

SEQ ID NO: 8716 - protein, 16 aa, Artificial Sequence
  Synthetically generated peptide
  VARIANT (1)..(16): Xaa = Any Amino Acid
ACEXYCANPAXXCTGC

SEQ ID NO: 8717 - protein, 17 aa, Artificial Sequence
  Synthetically generated peptide
  VARIANT (1)..(17): Xaa = Any Amino Acid
ACEXYCANPAXXXCTGC

SEQ ID NO: 8718 - protein, 17 aa, Artificial Sequence
  Synthetically generated peptide
  VARIANT (1)..(17): Xaa = Any Amino Acid
ACEXYCANPAXXCXTGC

SEQ ID NO: 8719 - protein, 17 aa, Artificial Sequence
  Synthetically generated peptide
  VARIANT (1)..(17): Xaa = Any Amino Acid
ACEXYCANPAXXCTXGC

SEQ ID NO: 8720 - protein, 17 aa, Artificial Sequence
  Synthetically generated peptide
  VARIANT (1)..(17): Xaa = Any Amino Acid
ACEXYCANPAXXCTGXC

SEQ ID NO: 8721 - protein, 16 aa, Artificial Sequence
  Synthetically generated peptide
  VARIANT (1)..(16): Xaa = Any Amino Acid
ACEXYCANPAXCXTGC

SEQ ID NO: 8722 - protein, 17 aa, Artificial Sequence
  Synthetically generated peptide
  VARIANT (1)..(17): Xaa = Any Amino Acid
ACEXYCANPAXCXXTGC

SEQ ID NO: 8723 - protein, 17 aa, Artificial Sequence
  Synthetically generated peptide
  VARIANT (1)..(17): Xaa = Any Amino Acid
ACEXYCANPAXCXTXGC

SEQ ID NO: 8724 - protein, 17 aa, Artificial Sequence
  Synthetically generated peptide
  VARIANT (1)..(17): Xaa = Any Amino Acid
ACEXYCANPAXCXTGXC

SEQ ID NO: 8725 - protein, 16 aa, Artificial Sequence
  Synthetically generated peptide
  VARIANT (1)..(16): Xaa = Any Amino Acid
ACEXYCANPAXCTXGC

SEQ ID NO: 8726 - protein, 17 aa, Artificial Sequence
  Synthetically generated peptide
  VARIANT (1)..(17): Xaa = Any Amino Acid
ACEXYCANPAXCTXXGC

SEQ ID NO: 8727 - protein, 17 aa, Artificial Sequence
  Synthetically generated peptide
  VARIANT (1)..(17): Xaa = Any Amino Acid
ACEXYCANPAXCTXGXC

SEQ ID NO: 8728 - protein, 16 aa, Artificial Sequence
  Synthetically generated peptide
  VARIANT (1)..(16): Xaa = Any Amino Acid
ACEXYCANPAXCTGXC

SEQ ID NO: 8729 - protein, 17 aa, Artificial Sequence
  Synthetically generated peptide
  VARIANT (1)..(17): Xaa = Any Amino Acid
ACEXYCANPAXCTGXXC

SEQ ID NO: 8730 - protein, 15 aa, Artificial Sequence
  Synthetically generated peptide
  VARIANT (1)..(15): Xaa = Any Amino Acid
ACEXYCANPACXTGC

SEQ ID NO: 8731 - protein, 16 aa, Artificial Sequence
  Synthetically generated peptide
  VARIANT (1)..(16): Xaa = Any Amino Acid
ACEXYCANPACXXTGC

SEQ ID NO: 8732 - protein, 17 aa, Artificial Sequence
  Synthetically generated peptide
  VARIANT (1)..(17): Xaa = Any Amino Acid
ACEXYCANPACXXXTGC

SEQ ID NO: 8733 - protein, 17 aa, Artificial Sequence
  Synthetically generated peptide
  VARIANT (1)..(17): Xaa = Any Amino Acid
ACEXYCANPACXXTXGC

SEQ ID NO: 8734 - protein, 17 aa, Artificial Sequence
  Synthetically generated peptide
  VARIANT (1)..(17): Xaa = Any Amino Acid
ACEXYCANPACXXTGXC

SEQ ID NO: 8735 - protein, 16 aa, Artificial Sequence
  Synthetically generated peptide
  VARIANT (1)..(16): Xaa = Any Amino Acid
ACEXYCANPACXTXGC

SEQ ID NO: 8736 - protein, 17 aa, Artificial Sequence
  Synthetically generated peptide
  VARIANT (1)..(17): Xaa = Any Amino Acid
ACEXYCANPACXTXXGC

SEQ ID NO: 8737 - protein, 17 aa, Artificial Sequence
  Synthetically generated peptide
  VARIANT (1)..(17): Xaa = Any Amino Acid
ACEXYCANPACXTXGXC

SEQ ID NO: 8738 - protein, 16 aa, Artificial Sequence
  Synthetically generated peptide
  VARIANT (1)..(16): Xaa = Any Amino Acid
ACEXYCANPACXTGXC

SEQ ID NO: 8739 - protein, 17 aa, Artificial Sequence
  Synthetically generated peptide
  VARIANT (1)..(17): Xaa = Any Amino Acid
ACEXYCANPACXTGXXC

SEQ ID NO: 8740 - protein, 15 aa, Artificial Sequence
  Synthetically generated peptide
  VARIANT (1)..(15): Xaa = Any Amino Acid
ACEXYCANPACTXGC

SEQ ID NO: 8741 - protein, 16 aa, Artificial Sequence
  Synthetically generated peptide
  VARIANT (1)..(16): Xaa = Any Amino Acid
ACEXYCANPACTXXGC

SEQ ID NO: 8742 - protein, 17 aa, Artificial Sequence
  Synthetically generated peptide
  VARIANT (1)..(17): Xaa = Any Amino Acid
ACEXYCANPACTXXXGC

SEQ ID NO: 8743 - protein, 17 aa, Artificial Sequence
  Synthetically generated peptide
  VARIANT (1)..(17): Xaa = Any Amino Acid
ACEXYCANPACTXXGXC

SEQ ID NO: 8744 - protein, 16 aa, Artificial Sequence
  Synthetically generated peptide
  VARIANT (1)..(16): Xaa = Any Amino Acid
ACEXYCANPACTXGXC

SEQ ID NO: 8745 - protein, 17 aa, Artificial Sequence
  Synthetically generated peptide
  VARIANT (1)..(17): Xaa = Any Amino Acid
ACEXYCANPACTXGXXC

SEQ ID NO: 8746 - protein, 15 aa, Artificial Sequence
  Synthetically generated peptide
  VARIANT (1)..(15): Xaa = Any Amino Acid
ACEXYCANPACTGXC

SEQ ID NO: 8747 - protein, 16 aa, Artificial Sequence
  Synthetically generated peptide
  VARIANT (1)..(16): Xaa = Any Amino Acid
ACEXYCANPACTGXXC

SEQ ID NO: 8748 - protein, 17 aa, Artificial Sequence
  Synthetically generated peptide
  VARIANT (1)..(17): Xaa = Any Amino Acid
ACEXYCANPACTGXXXC

SEQ ID NO: 8749 - protein, 14 aa, Artificial Sequence
  Synthetically generated peptide
  VARIANT (1)..(14): Xaa = Any Amino Acid
ACEYXCANPACTGC

SEQ ID NO: 8750 - protein, 15 aa, Artificial Sequence
  Synthetically generated peptide
  VARIANT (1)..(15): Xaa = Any Amino Acid
ACEYXXCANPACTGC

SEQ ID NO: 8751 - protein, 16 aa, Artificial Sequence
  Synthetically generated peptide
  VARIANT (1)..(16): Xaa = Any Amino Acid
ACEYXXXCANPACTGC

SEQ ID NO: 8752 - protein, 17 aa, Artificial Sequence
  Synthetically generated peptide
  VARIANT (1)..(17): Xaa = Any Amino Acid
ACEYXXXXCANPACTGC

SEQ ID NO: 8753 - protein, 17 aa, Artificial Sequence
  Synthetically generated peptide
  VARIANT (1)..(17): Xaa = Any Amino Acid
ACEYXXXCAXNPACTGC

SEQ ID NO: 8754 - protein, 17 aa, Artificial Sequence
  Synthetically generated peptide
  VARIANT (1)..(17): Xaa = Any Amino Acid
ACEYXXXCANXPACTGC

SEQ ID NO: 8755 - protein, 17 aa, Artificial Sequence
  Synthetically generated peptide
  VARIANT (1)..(17): Xaa = Any Amino Acid
ACEYXXXCANPXACTGC

SEQ ID NO: 8756 - protein, 17 aa, Artificial Sequence
  Synthetically generated peptide
  VARIANT (1)..(17): Xaa = Any Amino Acid
ACEYXXXCANPAXCTGC

SEQ ID NO: 8757 - protein, 17 aa, Artificial Sequence
  Synthetically generated peptide
  VARIANT (1)..(17): Xaa = Any Amino Acid
ACEYXXXCANPACXTGC

SEQ ID NO: 8758 - protein, 17 aa, Artificial Sequence
  Synthetically generated peptide
  VARIANT (1)..(17): Xaa = Any Amino Acid
ACEYXXXCANPACTXGC

SEQ ID NO: 8759 - protein, 17 aa, Artificial Sequence
  Synthetically generated peptide
  VARIANT (1)..(17): Xaa = Any Amino Acid
ACEYXXXCANPACTGXC

SEQ ID NO: 8760 - protein, 16 aa, Artificial Sequence
  Synthetically generated peptide
  VARIANT (1)..(16): Xaa = Any Amino Acid
ACEYXXCAXNPACTGC

SEQ ID NO: 8761 - protein, 17 aa, Artificial Sequence
  Synthetically generated peptide
  VARIANT (1)..(17): Xaa = Any Amino Acid
ACEYXXCAXXNPACTGC

SEQ ID NO: 8762 - protein, 17 aa, Artificial Sequence
  Synthetically generated peptide
  VARIANT (1)..(17): Xaa = Any Amino Acid
ACEYXXCAXNXPACTGC

SEQ ID NO: 8763 - protein, 17 aa, Artificial Sequence
  Synthetically generated peptide
  VARIANT (1)..(17): Xaa = Any Amino Acid
ACEYXXCAXNPXACTGC

SEQ ID NO: 8764 - protein, 17 aa, Artificial Sequence
  Synthetically generated peptide
  VARIANT (1)..(17): Xaa = Any Amino Acid
ACEYXXCAXNPAXCTGC

SEQ ID NO: 8765 - protein, 17 aa, Artificial Sequence
  Synthetically generated peptide
  VARIANT (1)..(17): Xaa = Any Amino Acid
ACEYXXCAXNPACXTGC

SEQ ID NO: 8766 - protein, 17 aa, Artificial Sequence
  Synthetically generated peptide
  VARIANT (1)..(17): Xaa = Any Amino Acid
ACEYXXCAXNPACTXGC

SEQ ID NO: 8767 - protein, 17 aa, Artificial Sequence
  Synthetically generated peptide
  VARIANT (1)..(17): Xaa = Any Amino Acid
ACEYXXCAXNPACTGXC

SEQ ID NO: 8768 - protein, 16 aa, Artificial Sequence
  Synthetically generated peptide
  VARIANT (1)..(16): Xaa = Any Amino Acid
ACEYXXCANXPACTGC

SEQ ID NO: 8769 - protein, 17 aa, Artificial Sequence
  Synthetically generated peptide
  VARIANT (1)..(17): Xaa = Any Amino Acid
ACEYXXCANXXPACTGC

SEQ ID NO: 8770 - protein, 17 aa, Artificial Sequence
  Synthetically generated peptide
  VARIANT (1)..(17): Xaa = Any Amino Acid
ACEYXXCANXPXACTGC

SEQ ID NO: 8771 - protein, 17 aa, Artificial Sequence
  Synthetically generated peptide
  VARIANT (1)..(17): Xaa = Any Amino Acid
ACEYXXCANXPAXCTGC

SEQ ID NO: 8772 - protein, 17 aa, Artificial Sequence
  Synthetically generated peptide
  VARIANT (1)..(17): Xaa = Any Amino Acid
ACEYXXCANXPACXTGC

SEQ ID NO: 8773 - protein, 17 aa, Artificial Sequence
  Synthetically generated peptide
  VARIANT (1)..(17): Xaa = Any Amino Acid
ACEYXXCANXPACTXGC

SEQ ID NO: 8774 - protein, 17 aa, Artificial Sequence
  Synthetically generated peptide
  VARIANT (1)..(17): Xaa = Any Amino Acid
ACEYXXCANXPACTGXC

SEQ ID NO: 8775 - protein, 16 aa, Artificial Sequence
  Synthetically generated peptide
  VARIANT (1)..(16): Xaa = Any Amino Acid
ACEYXXCANPXACTGC

SEQ ID NO: 8776 - protein, 17 aa, Artificial Sequence
  Synthetically generated peptide
  VARIANT (1)..(17): Xaa = Any Amino Acid
ACEYXXCANPXXACTGC

SEQ ID NO: 8777 - protein, 17 aa, Artificial Sequence
  Synthetically generated peptide
  VARIANT (1)..(17): Xaa = Any Amino Acid
ACEYXXCANPXAXCTGC

SEQ ID NO: 8778 - protein, 17 aa, Artificial Sequence
  Synthetically generated peptide
  VARIANT (1)..(17): Xaa = Any Amino Acid
ACEYXXCANPXACXTGC

SEQ ID NO: 8779 - protein, 17 aa, Artificial Sequence
  Synthetically generated peptide
  VARIANT (1)..(17): Xaa = Any Amino Acid
ACEYXXCANPXACTXGC

SEQ ID NO: 8780 - protein, 17 aa, Artificial Sequence
  Synthetically generated peptide
  VARIANT (1)..(17): Xaa = Any Amino Acid
ACEYXXCANPXACTGXC

SEQ ID NO: 8781 - protein, 16 aa, Artificial Sequence
  Synthetically generated peptide
  VARIANT (1)..(16): Xaa = Any Amino Acid
ACEYXXCANPAXCTGC

SEQ ID NO: 8782 - protein, 17 aa, Artificial Sequence
  Synthetically generated peptide
  VARIANT (1)..(17): Xaa = Any Amino Acid
ACEYXXCANPAXXCTGC

SEQ ID NO: 8783 - protein, 17 aa, Artificial Sequence
  Synthetically generated peptide
  VARIANT (1)..(17): Xaa = Any Amino Acid
ACEYXXCANPAXCXTGC

SEQ ID NO: 8784 - protein, 17 aa, Artificial Sequence
  Synthetically generated peptide
  VARIANT (1)..(17): Xaa = Any Amino Acid
ACEYXXCANPAXCTXGC

SEQ ID NO: 8785 - protein, 17 aa, Artificial Sequence
  Synthetically generated peptide
  VARIANT (1)..(17): Xaa = Any Amino Acid
ACEYXXCANPAXCTGXC

SEQ ID NO: 8786 - protein, 16 aa, Artificial Sequence
  Synthetically generated peptide
  VARIANT (1)..(16): Xaa = Any Amino Acid
ACEYXXCANPACXTGC

SEQ ID NO: 8787 - protein, 17 aa, Artificial Sequence
  Synthetically generated peptide
  VARIANT (1)..(17): Xaa = Any Amino Acid
ACEYXXCANPACXXTGC

SEQ ID NO: 8788 - protein, 17 aa, Artificial Sequence
  Synthetically generated peptide
  VARIANT (1)..(17): Xaa = Any Amino Acid
ACEYXXCANPACXTXGC

SEQ ID NO: 8789 - protein, 17 aa, Artificial Sequence
  Synthetically generated peptide
  VARIANT (1)..(17): Xaa = Any Amino Acid
ACEYXXCANPACXTGXC

SEQ ID NO: 8790 - protein, 16 aa, Artificial Sequence
  Synthetically generated peptide
  VARIANT (1)..(16): Xaa = Any Amino Acid
ACEYXXCANPACTXGC

SEQ ID NO: 8791 - protein, 17 aa, Artificial Sequence
  Synthetically generated peptide
  VARIANT (1)..(17): Xaa = Any Amino Acid
ACEYXXCANPACTXXGC

SEQ ID NO: 8792 - protein, 17 aa, Artificial Sequence
  Synthetically generated peptide
  VARIANT (1)..(17): Xaa = Any Amino Acid
ACEYXXCANPACTXGXC

SEQ ID NO: 8793 - protein, 16 aa, Artificial Sequence
  Synthetically generated peptide
  VARIANT (1)..(16): Xaa = Any Amino Acid
ACEYXXCANPACTGXC

SEQ ID NO: 8794 - protein, 17 aa, Artificial Sequence
  Synthetically generated peptide
  VARIANT (1)..(17): Xaa = Any Amino Acid
ACEYXXCANPACTGXXC

SEQ ID NO: 8795 - protein, 15 aa, Artificial Sequence
  Synthetically generated peptide
  VARIANT (1)..(15): Xaa = Any Amino Acid
ACEYXCAXNPACTGC

SEQ ID NO: 8796 - protein, 16 aa, Artificial Sequence
  Synthetically generated peptide
  VARIANT (1)..(16): Xaa = Any Amino Acid
ACEYXCAXXNPACTGC

SEQ ID NO: 8797 - protein, 17 aa, Artificial Sequence
  Synthetically generated peptide
  VARIANT (1)..(17): Xaa = Any Amino Acid
ACEYXCAXXXNPACTGC

SEQ ID NO: 8798 - protein, 17 aa, Artificial Sequence
  Synthetically generated peptide
  VARIANT (1)..(17): Xaa = Any Amino Acid
ACEYXCAXXNXPACTGC

SEQ ID NO: 8799 - protein, 17 aa, Artificial Sequence
  Synthetically generated peptide
  VARIANT (1)..(17): Xaa = Any Amino Acid
ACEYXCAXXNPXACTGC

SEQ ID NO: 8800 - protein, 17 aa, Artificial Sequence
  Synthetically generated peptide
  VARIANT (1)..(17): Xaa = Any Amino Acid
ACEYXCAXXNPAXCTGC

SEQ ID NO: 8801 - protein, 17 aa, Artificial Sequence
  Synthetically generated peptide
  VARIANT (1)..(17): Xaa = Any Amino Acid
ACEYXCAXXNPACXTGC

SEQ ID NO: 8802 - protein, 17 aa, Artificial Sequence
  Synthetically generated peptide
  VARIANT (1)..(17): Xaa = Any Amino Acid
ACEYXCAXXNPACTXGC

SEQ ID NO: 8803 - protein, 17 aa, Artificial Sequence
  Synthetically generated peptide
  VARIANT (1)..(17): Xaa = Any Amino Acid
ACEYXCAXXNPACTGXC

SEQ ID NO: 8804 - protein, 16 aa, Artificial Sequence
  Synthetically generated peptide
  VARIANT (1)..(16): Xaa = Any Amino Acid
ACEYXCAXNXPACTGC

SEQ ID NO: 8805 - protein, 17 aa, Artificial Sequence
  Synthetically generated peptide
  VARIANT (1)..(17): Xaa = Any Amino Acid
ACEYXCAXNXXPACTGC

SEQ ID NO: 8806 - protein, 17 aa, Artificial Sequence
  Synthetically generated peptide
  VARIANT (1)..(17): Xaa = Any Amino Acid
ACEYXCAXNXPXACTGC

SEQ ID NO: 8807 - protein, 17 aa, Artificial Sequence
  Synthetically generated peptide
  VARIANT (1)..(17): Xaa = Any Amino Acid
ACEYXCAXNXPAXCTGC

SEQ ID NO: 8808 - protein, 17 aa, Artificial Sequence
  Synthetically generated peptide
  VARIANT (1)..(17): Xaa = Any Amino Acid
ACEYXCAXNXPACXTGC

SEQ ID NO: 8809 - protein, 17 aa, Artificial Sequence
  Synthetically generated peptide
  VARIANT (1)..(17): Xaa = Any Amino Acid
ACEYXCAXNXPACTXGC

SEQ ID NO: 8810 - protein, 17 aa, Artificial Sequence
  Synthetically generated peptide
  VARIANT (1)..(17): Xaa = Any Amino Acid
ACEYXCAXNXPACTGXC

SEQ ID NO: 8811 - protein, 16 aa, Artificial Sequence
  Synthetically generated peptide
  VARIANT (1)..(16): Xaa = Any Amino Acid
ACEYXCAXNPXACTGC

SEQ ID NO: 8812 - protein, 17 aa, Artificial Sequence
  Synthetically generated peptide
  VARIANT (1)..(17): Xaa = Any Amino Acid
ACEYXCAXNPXXACTGC

SEQ ID NO: 8813 - protein, 17 aa, Artificial Sequence
  Synthetically generated peptide
  VARIANT (1)..(17): Xaa = Any Amino Acid
ACEYXCAXNPXAXCTGC

SEQ ID NO: 8814 - protein, 17 aa, Artificial Sequence
  Synthetically generated peptide
  VARIANT (1)..(17): Xaa = Any Amino Acid
ACEYXCAXNPXACXTGC

SEQ ID NO: 8815 - protein, 17 aa, Artificial Sequence
  Synthetically generated peptide
  VARIANT (1)..(17): Xaa = Any Amino Acid
ACEYXCAXNPXACTXGC

SEQ ID NO: 8816 - protein, 17 aa, Artificial Sequence
  Synthetically generated peptide
  VARIANT (1)..(17): Xaa = Any Amino Acid
ACEYXCAXNPXACTGXC

SEQ ID NO: 8817 - protein, 16 aa, Artificial Sequence
  Synthetically generated peptide
  VARIANT (1)..(16): Xaa = Any Amino Acid
ACEYXCAXNPAXCTGC

SEQ ID NO: 8818 - protein, 17 aa, Artificial Sequence
  Synthetically generated peptide
  VARIANT (1)..(17): Xaa = Any Amino Acid
ACEYXCAXNPAXXCTGC

SEQ ID NO: 8819 - protein, 17 aa, Artificial Sequence
  Synthetically generated peptide
  VARIANT (1)..(17): Xaa = Any Amino Acid
ACEYXCAXNPAXCXTGC

SEQ ID NO: 8820 - protein, 17 aa, Artificial Sequence
  Synthetically generated peptide
  VARIANT (1)..(17): Xaa = Any Amino Acid
ACEYXCAXNPAXCTXGC

SEQ ID NO: 8821 - protein, 17 aa, Artificial Sequence
  Synthetically generated peptide
  VARIANT (1)..(17): Xaa = Any Amino Acid
ACEYXCAXNPAXCTGXC

SEQ ID NO: 8822 - protein, 16 aa, Artificial Sequence
  Synthetically generated peptide
  VARIANT (1)..(16): Xaa = Any Amino Acid
ACEYXCAXNPACXTGC

SEQ ID NO: 8823 - protein, 17 aa, Artificial Sequence
  Synthetically generated peptide
  VARIANT (1)..(17): Xaa = Any Amino Acid
ACEYXCAXNPACXXTGC

SEQ ID NO: 8824 - protein, 17 aa, Artificial Sequence
  Synthetically generated peptide
  VARIANT (1)..(17): Xaa = Any Amino Acid
ACEYXCAXNPACXTXGC

SEQ ID NO: 8825 - protein, 17 aa, Artificial Sequence
  Synthetically generated peptide
  VARIANT (1)..(17): Xaa = Any Amino Acid
ACEYXCAXNPACXTGXC

SEQ ID NO: 8826 - protein, 16 aa, Artificial Sequence
  Synthetically generated peptide
  VARIANT (1)..(16): Xaa = Any Amino Acid
ACEYXCAXNPACTXGC

SEQ ID NO: 8827 - protein, 17 aa, Artificial Sequence
  Synthetically generated peptide
  VARIANT (1)..(17): Xaa = Any Amino Acid
ACEYXCAXNPACTXXGC

SEQ ID NO: 8828 - protein, 17 aa, Artificial Sequence
  Synthetically generated peptide
  VARIANT (1)..(17): Xaa = Any Amino Acid
ACEYXCAXNPACTXGXC

SEQ ID NO: 8829 - protein, 16 aa, Artificial Sequence
  Synthetically generated peptide
  VARIANT (1)..(16): Xaa = Any Amino Acid
ACEYXCAXNPACTGXC

SEQ ID NO: 8830 - protein, 17 aa, Artificial Sequence
  Synthetically generated peptide
  VARIANT (1)..(17): Xaa = Any Amino Acid
ACEYXCAXNPACTGXXC

SEQ ID NO: 8831 - protein, 15 aa, Artificial Sequence
  Synthetically generated peptide
  VARIANT (1)..(15): Xaa = Any Amino Acid
ACEYXCANXPACTGC

SEQ ID NO: 8832 - protein, 16 aa, Artificial Sequence
  Synthetically generated peptide
  VARIANT (1)..(16): Xaa = Any Amino Acid
ACEYXCANXXPACTGC

SEQ ID NO: 8833 - protein, 17 aa, Artificial Sequence
  Synthetically generated peptide
  VARIANT (1)..(17): Xaa = Any Amino Acid
ACEYXCANXXXPACTGC

SEQ ID NO: 8834 - protein, 17 aa, Artificial Sequence
  Synthetically generated peptide
  VARIANT (1)..(17): Xaa = Any Amino Acid
ACEYXCANXXPXACTGC

SEQ ID NO: 8835 - protein, 17 aa, Artificial Sequence
  Synthetically generated peptide
  VARIANT (1)..(17): Xaa = Any Amino Acid
ACEYXCANXXPAXCTGC

SEQ ID NO: 8836 - protein, 17 aa, Artificial Sequence
  Synthetically generated peptide
  VARIANT (1)..(17): Xaa = Any Amino Acid
ACEYXCANXXPACXTGC

SEQ ID NO: 8837 - protein, 17 aa, Artificial Sequence
  Synthetically generated peptide
  VARIANT (1)..(17): Xaa = Any Amino Acid
ACEYXCANXXPACTXGC

SEQ ID NO: 8838 - protein, 17 aa, Artificial Sequence
  Synthetically generated peptide
  VARIANT (1)..(17): Xaa = Any Amino Acid
ACEYXCANXXPACTGXC

SEQ ID NO: 8839 - protein, 16 aa, Artificial Sequence
  Synthetically generated peptide
  VARIANT (1)..(16): Xaa = Any Amino Acid
ACEYXCANXPXACTGC

SEQ ID NO: 8840 - protein, 17 aa, Artificial Sequence
  Synthetically generated peptide
  VARIANT (1)..(17): Xaa = Any Amino Acid
ACEYXCANXPXXACTGC

SEQ ID NO: 8841 - protein, 17 aa, Artificial Sequence
  Synthetically generated peptide
  VARIANT (1)..(17): Xaa = Any Amino Acid
ACEYXCANXPXAXCTGC

SEQ ID NO: 8842 - protein, 17 aa, Artificial Sequence
  Synthetically generated peptide
  VARIANT (1)..(17): Xaa = Any Amino Acid
ACEYXCANXPXACXTGC

SEQ ID NO: 8843 - protein, 17 aa, Artificial Sequence
  Synthetically generated peptide
  VARIANT (1)..(17): Xaa = Any Amino Acid
ACEYXCANXPXACTXGC

SEQ ID NO: 8844 - protein, 17 aa, Artificial Sequence
  Synthetically generated peptide
  VARIANT (1)..(17): Xaa = Any Amino Acid
ACEYXCANXPXACTGXC

SEQ ID NO: 8845 - protein, 16 aa, Artificial Sequence
  Synthetically generated peptide
  VARIANT (1)..(16): Xaa = Any Amino Acid
ACEYXCANXPAXCTGC

SEQ ID NO: 8846 - protein, 17 aa, Artificial Sequence
  Synthetically generated peptide
  VARIANT (1)..(17): Xaa = Any Amino Acid
ACEYXCANXPAXXCTGC

SEQ ID NO: 8847 - protein, 17 aa, Artificial Sequence
  Synthetically generated peptide
  VARIANT (1)..(17): Xaa = Any Amino Acid
ACEYXCANXPAXCXTGC

SEQ ID NO: 8848 - protein, 17 aa, Artificial Sequence
  Synthetically generated peptide
  VARIANT (1)..(17): Xaa = Any Amino Acid
ACEYXCANXPAXCTXGC

SEQ ID NO: 8849 - protein, 17 aa, Artificial Sequence
  Synthetically generated peptide
  VARIANT (1)..(17): Xaa = Any Amino Acid
ACEYXCANXPAXCTGXC

SEQ ID NO: 8850 - protein, 16 aa, Artificial Sequence
  Synthetically generated peptide
  VARIANT (1)..(16): Xaa = Any Amino Acid
ACEYXCANXPACXTGC

SEQ ID NO: 8851 - protein, 17 aa, Artificial Sequence
  Synthetically generated peptide
  VARIANT (1)..(17): Xaa = Any Amino Acid
ACEYXCANXPACXXTGC

SEQ ID NO: 8852 - protein, 17 aa, Artificial Sequence
  Synthetically generated peptide
  VARIANT (1)..(17): Xaa = Any Amino Acid
ACEYXCANXPACXTXGC

SEQ ID NO: 8853 - protein, 17 aa, Artificial Sequence
  Synthetically generated peptide
  VARIANT (1)..(17): Xaa = Any Amino Acid
ACEYXCANXPACXTGXC

SEQ ID NO: 8854 - protein, 16 aa, Artificial Sequence
  Synthetically generated peptide
  VARIANT (1)..(16): Xaa = Any Amino Acid
ACEYXCANXPACTXGC

SEQ ID NO: 8855 - protein, 17 aa, Artificial Sequence
  Synthetically generated peptide
  VARIANT (1)..(17): Xaa = Any Amino Acid
ACEYXCANXPACTXXGC

SEQ ID NO: 8856 - protein, 17 aa, Artificial Sequence
  Synthetically generated peptide
  VARIANT (1)..(17): Xaa = Any Amino Acid
ACEYXCANXPACTXGXC

SEQ ID NO: 8857 - protein, 16 aa, Artificial Sequence
  Synthetically generated peptide
  VARIANT (1)..(16): Xaa = Any Amino Acid
ACEYXCANXPACTGXC

SEQ ID NO: 8858 - protein, 17 aa, Artificial Sequence
  Synthetically generated peptide
  VARIANT (1)..(17): Xaa = Any Amino Acid
ACEYXCANXPACTGXXC

SEQ ID NO: 8859 - protein, 15 aa, Artificial Sequence
  Synthetically generated peptide
  VARIANT (1)..(15): Xaa = Any Amino Acid
ACEYXCANPXACTGC

SEQ ID NO: 8860 - protein, 16 aa, Artificial Sequence
  Synthetically generated peptide
  VARIANT (1)..(16): Xaa = Any Amino Acid
ACEYXCANPXXACTGC

SEQ ID NO: 8861 - protein, 17 aa, Artificial Sequence
  Synthetically generated peptide
  VARIANT (1)..(17): Xaa = Any Amino Acid
ACEYXCANPXXXACTGC

SEQ ID NO: 8862 - protein, 17 aa, Artificial Sequence
  Synthetically generated peptide
  VARIANT (1)..(17): Xaa = Any Amino Acid
ACEYXCANPXXAXCTGC

SEQ ID NO: 8863 - protein, 17 aa, Artificial Sequence
  Synthetically generated peptide
  VARIANT (1)..(17): Xaa = Any Amino Acid
ACEYXCANPXXACXTGC

SEQ ID NO: 8864 - protein, 17 aa, Artificial Sequence
  Synthetically generated peptide
  VARIANT (1)..(17): Xaa = Any Amino Acid
ACEYXCANPXXACTXGC

SEQ ID NO: 8865 - protein, 17 aa, Artificial Sequence
  Synthetically generated peptide
  VARIANT (1)..(17): Xaa = Any Amino Acid
ACEYXCANPXXACTGXC

SEQ ID NO: 8866 - protein, 16 aa, Artificial Sequence
  Synthetically generated peptide
  VARIANT (1)..(16): Xaa = Any Amino Acid
ACEYXCANPXAXCTGC

SEQ ID NO: 8867 - protein, 17 aa, Artificial Sequence
  Synthetically generated peptide
  VARIANT (1)..(17): Xaa = Any Amino Acid
ACEYXCANPXAXXCTGC

SEQ ID NO: 8868 - protein, 17 aa, Artificial Sequence
  Synthetically generated peptide
  VARIANT (1)..(17): Xaa = Any Amino Acid
ACEYXCANPXAXCXTGC

SEQ ID NO: 8869 - protein, 17 aa, Artificial Sequence
  Synthetically generated peptide
  VARIANT (1)..(17): Xaa = Any Amino Acid
ACEYXCANPXAXCTXGC

SEQ ID NO: 8870 - protein, 17 aa, Artificial Sequence
  Synthetically generated peptide
  VARIANT (1)..(17): Xaa = Any Amino Acid
ACEYXCANPXAXCTGXC

SEQ ID NO: 8871 - protein, 16 aa, Artificial Sequence
  Synthetically generated peptide
  VARIANT (1)..(16): Xaa = Any Amino Acid
ACEYXCANPXACXTGC

SEQ ID NO: 8872 - protein, 17 aa, Artificial Sequence
  Synthetically generated peptide
  VARIANT (1)..(17): Xaa = Any Amino Acid
ACEYXCANPXACXXTGC

SEQ ID NO: 8873 - protein, 17 aa, Artificial Sequence
  Synthetically generated peptide
  VARIANT (1)..(17): Xaa = Any Amino Acid
ACEYXCANPXACXTXGC

SEQ ID NO: 8874 - protein, 17 aa, Artificial Sequence
  Synthetically generated peptide
  VARIANT (1)..(17): Xaa = Any Amino Acid
ACEYXCANPXACXTGXC

SEQ ID NO: 8875 - protein, 16 aa, Artificial Sequence
  Synthetically generated peptide
  VARIANT (1)..(16): Xaa = Any Amino Acid
ACEYXCANPXACTXGC

SEQ ID NO: 8876 - protein, 17 aa, Artificial Sequence
  Synthetically generated peptide
  VARIANT (1)..(17): Xaa = Any Amino Acid
ACEYXCANPXACTXXGC

SEQ ID NO: 8877 - protein, 17 aa, Artificial Sequence
  Synthetically generated peptide
  VARIANT (1)..(17): Xaa = Any Amino Acid
ACEYXCANPXACTXGXC

SEQ ID NO: 8878 - protein, 16 aa, Artificial Sequence
  Synthetically generated peptide
  VARIANT (1)..(16): Xaa = Any Amino Acid
ACEYXCANPXACTGXC

SEQ ID NO: 8879 - protein, 17 aa, Artificial Sequence
  Synthetically generated peptide
  VARIANT (1)..(17): Xaa = Any Amino Acid
ACEYXCANPXACTGXXC

SEQ ID NO: 8880 - protein, 15 aa, Artificial Sequence
  Synthetically generated peptide
  VARIANT (1)..(15): Xaa = Any Amino Acid
ACEYXCANPAXCTGC

SEQ ID NO: 8881 - protein, 16 aa, Artificial Sequence
  Synthetically generated peptide
  VARIANT (1)..(16): Xaa = Any Amino Acid
ACEYXCANPAXXCTGC

SEQ ID NO: 8882 - protein, 17 aa, Artificial Sequence
  Synthetically generated peptide
  VARIANT (1)..(17): Xaa = Any Amino Acid
ACEYXCANPAXXXCTGC

SEQ ID NO: 8883 - protein, 17 aa, Artificial Sequence
  Synthetically generated peptide
  VARIANT (1)..(17): Xaa = Any Amino Acid
ACEYXCANPAXXCXTGC

SEQ ID NO: 8884 - protein, 17 aa, Artificial Sequence
  Synthetically generated peptide
  VARIANT (1)..(17): Xaa = Any Amino Acid
ACEYXCANPAXXCTXGC

SEQ ID NO: 8885 - protein, 17 aa, Artificial Sequence
  Synthetically generated peptide
  VARIANT (1)..(17): Xaa = Any Amino Acid
ACEYXCANPAXXCTGXC

SEQ ID NO: 8886 - protein, 16 aa, Artificial Sequence
  Synthetically generated peptide
  VARIANT (1)..(16): Xaa = Any Amino Acid
ACEYXCANPAXCXTGC

SEQ ID NO: 8887 - protein, 17 aa, Artificial Sequence
  Synthetically generated peptide
  VARIANT (1)..(17): Xaa = Any Amino Acid
ACEYXCANPAXCXXTGC

SEQ ID NO: 8888 - protein, 17 aa, Artificial Sequence
  Synthetically generated peptide
  VARIANT (1)..(17): Xaa = Any Amino Acid
ACEYXCANPAXCXTXGC

SEQ ID NO: 8889 - protein, 17 aa, Artificial Sequence
  Synthetically generated peptide
  VARIANT (1)..(17): Xaa = Any Amino Acid
ACEYXCANPAXCXTGXC

SEQ ID NO: 8890 - protein, 16 aa, Artificial Sequence
  Synthetically generated peptide
  VARIANT (1)..(16): Xaa = Any Amino Acid
ACEYXCANPAXCTXGC

SEQ ID NO: 8891 - protein, 17 aa, Artificial Sequence
  Synthetically generated peptide
  VARIANT (1)..(17): Xaa = Any Amino Acid
ACEYXCANPAXCTXXGC

SEQ ID NO: 8892 - protein, 17 aa, Artificial Sequence
  Synthetically generated peptide
  VARIANT (1)..(17): Xaa = Any Amino Acid
ACEYXCANPAXCTXGXC

SEQ ID NO: 8893 - protein, 16 aa, Artificial Sequence
  Synthetically generated peptide
  VARIANT (1)..(16): Xaa = Any Amino Acid
ACEYXCANPAXCTGXC

SEQ ID NO: 8894 - protein, 17 aa, Artificial Sequence
  Synthetically generated peptide
  VARIANT (1)..(17): Xaa = Any Amino Acid
ACEYXCANPAXCTGXXC

SEQ ID NO: 8895 - protein, 15 aa, Artificial Sequence
  Synthetically generated peptide
  VARIANT (1)..(15): Xaa = Any Amino Acid
ACEYXCANPACXTGC

SEQ ID NO: 8896 - protein, 16 aa, Artificial Sequence
  Synthetically generated peptide
  VARIANT (1)..(16): Xaa = Any Amino Acid
ACEYXCANPACXXTGC

SEQ ID NO: 8897 - protein, 17 aa, Artificial Sequence
  Synthetically generated peptide
  VARIANT (1)..(17): Xaa = Any Amino Acid
ACEYXCANPACXXXTGC

SEQ ID NO: 8898 - protein, 17 aa, Artificial Sequence
  Synthetically generated peptide
  VARIANT (1)..(17): Xaa = Any Amino Acid
ACEYXCANPACXXTXGC

SEQ ID NO: 8899 - protein, 17 aa, Artificial Sequence
  Synthetically generated peptide
  VARIANT (1)..(17): Xaa = Any Amino Acid
ACEYXCANPACXXTGXC

SEQ ID NO: 8900 - protein, 16 aa, Artificial Sequence
  Synthetically generated peptide
  VARIANT (1)..(16): Xaa = Any Amino Acid
ACEYXCANPACXTXGC

SEQ ID NO: 8901 - protein, 17 aa, Artificial Sequence
  Synthetically generated peptide
  VARIANT (1)..(17): Xaa = Any Amino Acid
ACEYXCANPACXTXXGC

SEQ ID NO: 8902 - protein, 17 aa, Artificial Sequence
  Synthetically generated peptide
  VARIANT (1)..(17): Xaa = Any Amino Acid
ACEYXCANPACXTXGXC

SEQ ID NO: 8903 - protein, 16 aa, Artificial Sequence
  Synthetically generated peptide
  VARIANT (1)..(16): Xaa = Any Amino Acid
ACEYXCANPACXTGXC

SEQ ID NO: 8904 - protein, 17 aa, Artificial Sequence
  Synthetically generated peptide
  VARIANT (1)..(17): Xaa = Any Amino Acid
ACEYXCANPACXTGXXC

SEQ ID NO: 8905 - protein, 15 aa, Artificial Sequence
  Synthetically generated peptide
  VARIANT (1)..(15): Xaa = Any Amino Acid
ACEYXCANPACTXGC

SEQ ID NO: 8906 - protein, 16 aa, Artificial Sequence
  Synthetically generated peptide
  VARIANT (1)..(16): Xaa = Any Amino Acid
ACEYXCANPACTXXGC

SEQ ID NO: 8907 - protein, 17 aa, Artificial Sequence
  Synthetically generated peptide
  VARIANT (1)..(17): Xaa = Any Amino Acid
ACEYXCANPACTXXXGC

SEQ ID NO: 8908 - protein, 17 aa, Artificial Sequence
  Synthetically generated peptide
  VARIANT (1)..(17): Xaa = Any Amino Acid
ACEYXCANPACTXXGXC

SEQ ID NO: 8909 - protein, 16 aa, Artificial Sequence
  Synthetically generated peptide
  VARIANT (1)..(16): Xaa = Any Amino Acid
ACEYXCANPACTXGXC

SEQ ID NO: 8910 - protein, 17 aa, Artificial Sequence
  Synthetically generated peptide
  VARIANT (1)..(17): Xaa = Any Amino Acid
ACEYXCANPACTXGXXC

SEQ ID NO: 8911 - protein, 15 aa, Artificial Sequence
  Synthetically generated peptide
  VARIANT (1)..(15): Xaa = Any Amino Acid
ACEYXCANPACTGXC

SEQ ID NO: 8912 - protein, 16 aa, Artificial Sequence
  Synthetically generated peptide
  VARIANT (1)..(16): Xaa = Any Amino Acid
ACEYXCANPACTGXXC

SEQ ID NO: 8913 - protein, 17 aa, Artificial Sequence
  Synthetically generated peptide
  VARIANT (1)..(17): Xaa = Any Amino Acid
ACEYXCANPACTGXXXC

SEQ ID NO: 8914 - protein, 14 aa, Artificial Sequence
  Synthetically generated peptide
  VARIANT (1)..(14): Xaa = Any Amino Acid
ACEYCAXNPACTGC

SEQ ID NO: 8915 - protein, 15 aa, Artificial Sequence
  Synthetically generated peptide
  VARIANT (1)..(15): Xaa = Any Amino Acid
ACEYCAXXNPACTGC

SEQ ID NO: 8916 - protein, 16 aa, Artificial Sequence
  Synthetically generated peptide
  VARIANT (1)..(16): Xaa = Any Amino Acid
ACEYCAXXXNPACTGC

SEQ ID NO: 8917 - protein, 17 aa, Artificial Sequence
  Synthetically generated peptide
  VARIANT (1)..(17): Xaa = Any Amino Acid
ACEYCAXXXXNPACTGC

SEQ ID NO: 8918 - protein, 17 aa, Artificial Sequence
  Synthetically generated peptide
  VARIANT (1)..(17): Xaa = Any Amino Acid
ACEYCAXXXNXPACTGC

SEQ ID NO: 8919 - protein, 17 aa, Artificial Sequence
  Synthetically generated peptide
  VARIANT (1)..(17): Xaa = Any Amino Acid
ACEYCAXXXNPXACTGC

SEQ ID NO: 8920 - protein, 17 aa, Artificial Sequence
  Synthetically generated peptide
  VARIANT (1)..(17): Xaa = Any Amino Acid
ACEYCAXXXNPAXCTGC

SEQ ID NO: 8921 - protein, 17 aa, Artificial Sequence
  Synthetically generated peptide
  VARIANT (1)..(17): Xaa = Any Amino Acid
ACEYCAXXXNPACXTGC

SEQ ID NO: 8922 - protein, 17 aa, Artificial Sequence
  Synthetically generated peptide
  VARIANT (1)..(17): Xaa = Any Amino Acid
ACEYCAXXXNPACTXGC

SEQ ID NO: 8923 - protein, 17 aa, Artificial Sequence
  Synthetically generated peptide
  VARIANT (1)..(17): Xaa = Any Amino Acid
ACEYCAXXXNPACTGXC

SEQ ID NO: 8924 - protein, 16 aa, Artificial Sequence
  Synthetically generated peptide
  VARIANT (1)..(16): Xaa = Any Amino Acid
ACEYCAXXNXPACTGC

SEQ ID NO: 8925 - protein, 17 aa, Artificial Sequence
  Synthetically generated peptide
  VARIANT (1)..(17): Xaa = Any Amino Acid
ACEYCAXXNXXPACTGC

SEQ ID NO: 8926 - protein, 17 aa, Artificial Sequence
  Synthetically generated peptide
  VARIANT (1)..(17): Xaa = Any Amino Acid
ACEYCAXXNXPXACTGC

SEQ ID NO: 8927 - protein, 17 aa, Artificial Sequence
  Synthetically generated peptide
  VARIANT (1)..(17): Xaa = Any Amino Acid
ACEYCAXXNXPAXCTGC

SEQ ID NO: 8928 - protein, 17 aa, Artificial Sequence
  Synthetically generated peptide
  VARIANT (1)..(17): Xaa = Any Amino Acid
ACEYCAXXNXPACXTGC

SEQ ID NO: 8929 - protein, 17 aa, Artificial Sequence
  Synthetically generated peptide
  VARIANT (1)..(17): Xaa = Any Amino Acid
ACEYCAXXNXPACTXGC

SEQ ID NO: 8930 - protein, 17 aa, Artificial Sequence
  Synthetically generated peptide
  VARIANT (1)..(17): Xaa = Any Amino Acid
ACEYCAXXNXPACTGXC

SEQ ID NO: 8931 - protein, 16 aa, Artificial Sequence
  Synthetically generated peptide
  VARIANT (1)..(16): Xaa = Any Amino Acid
ACEYCAXXNPXACTGC

SEQ ID NO: 8932 - protein, 17 aa, Artificial Sequence
  Synthetically generated peptide
  VARIANT (1)..(17): Xaa = Any Amino Acid
ACEYCAXXNPXXACTGC

SEQ ID NO: 8933 - protein, 17 aa, Artificial Sequence
  Synthetically generated peptide
  VARIANT (1)..(17): Xaa = Any Amino Acid
ACEYCAXXNPXAXCTGC

SEQ ID NO: 8934 - protein, 17 aa, Artificial Sequence
  Synthetically generated peptide
  VARIANT (1)..(17): Xaa = Any Amino Acid
ACEYCAXXNPXACXTGC

SEQ ID NO: 8935 - protein, 17 aa, Artificial Sequence
  Synthetically generated peptide
  VARIANT (1)..(17): Xaa = Any Amino Acid
ACEYCAXXNPXACTXGC

SEQ ID NO: 8936 - protein, 17 aa, Artificial Sequence
  Synthetically generated peptide
  VARIANT (1)..(17): Xaa = Any Amino Acid
ACEYCAXXNPXACTGXC

SEQ ID NO: 8937 - protein, 16 aa, Artificial Sequence
  Synthetically generated peptide
  VARIANT (1)..(16): Xaa = Any Amino Acid
ACEYCAXXNPAXCTGC

SEQ ID NO: 8938 - protein, 17 aa, Artificial Sequence
  Synthetically generated peptide
  VARIANT (1)..(17): Xaa = Any Amino Acid
ACEYCAXXNPAXXCTGC

SEQ ID NO: 8939 - protein, 17 aa, Artificial Sequence
  Synthetically generated peptide
  VARIANT (1)..(17): Xaa = Any Amino Acid
ACEYCAXXNPAXCXTGC

SEQ ID NO: 8940 - protein, 17 aa, Artificial Sequence
  Synthetically generated peptide
  VARIANT (1)..(17): Xaa = Any Amino Acid
ACEYCAXXNPAXCTXGC

SEQ ID NO: 8941 - protein, 17 aa, Artificial Sequence
  Synthetically generated peptide
  VARIANT (1)..(17): Xaa = Any Amino Acid
ACEYCAXXNPAXCTGXC

SEQ ID NO: 8942 - protein, 16 aa, Artificial Sequence
  Synthetically generated peptide
  VARIANT (1)..(16): Xaa = Any Amino Acid
ACEYCAXXNPACXTGC

SEQ ID NO: 8943 - protein, 17 aa, Artificial Sequence
  Synthetically generated peptide
  VARIANT (1)..(17): Xaa = Any Amino Acid
ACEYCAXXNPACXXTGC

SEQ ID NO: 8944 - protein, 17 aa, Artificial Sequence
  Synthetically generated peptide
  VARIANT (1)..(17): Xaa = Any Amino Acid
ACEYCAXXNPACXTXGC

SEQ ID NO: 8945 - protein, 17 aa, Artificial Sequence
  Synthetically generated peptide
  VARIANT (1)..(17): Xaa = Any Amino Acid
ACEYCAXXNPACXTGXC

SEQ ID NO: 8946 - protein, 16 aa, Artificial Sequence
  Synthetically generated peptide
  VARIANT (1)..(16): Xaa = Any Amino Acid
ACEYCAXXNPACTXGC

SEQ ID NO: 8947 - protein, 17 aa, Artificial Sequence
  Synthetically generated peptide
  VARIANT (1)..(17): Xaa = Any Amino Acid
ACEYCAXXNPACTXXGC

SEQ ID NO: 8948 - protein, 17 aa, Artificial Sequence
  Synthetically generated peptide
  VARIANT (1)..(17): Xaa = Any Amino Acid
ACEYCAXXNPACTXGXC

SEQ ID NO: 8949 - protein, 16 aa, Artificial Sequence
  Synthetically generated peptide
  VARIANT (1)..(16): Xaa = Any Amino Acid
ACEYCAXXNPACTGXC

SEQ ID NO: 8950 - protein, 17 aa, Artificial Sequence
  Synthetically generated peptide
  VARIANT (1)..(17): Xaa = Any Amino Acid
ACEYCAXXNPACTGXXC

SEQ ID NO: 8951 - protein, 15 aa, Artificial Sequence
  Synthetically generated peptide
  VARIANT (1)..(15): Xaa = Any Amino Acid
ACEYCAXNXPACTGC

SEQ ID NO: 8952 - protein, 16 aa, Artificial Sequence
  Synthetically generated peptide
  VARIANT (1)..(16): Xaa = Any Amino Acid
ACEYCAXNXXPACTGC

SEQ ID NO: 8953 - protein, 17 aa, Artificial Sequence
  Synthetically generated peptide
  VARIANT (1)..(17): Xaa = Any Amino Acid
ACEYCAXNXXXPACTGC

SEQ ID NO: 8954 - protein, 17 aa, Artificial Sequence
  Synthetically generated peptide
  VARIANT (1)..(17): Xaa = Any Amino Acid
ACEYCAXNXXPXACTGC

SEQ ID NO: 8955 - protein, 17 aa, Artificial Sequence
  Synthetically generated peptide
  VARIANT (1)..(17): Xaa = Any Amino Acid
ACEYCAXNXXPAXCTGC

SEQ ID NO: 8956 - protein, 17 aa, Artificial Sequence
  Synthetically generated peptide
  VARIANT (1)..(17): Xaa = Any Amino Acid
ACEYCAXNXXPACXTGC

SEQ ID NO: 8957 - protein, 17 aa, Artificial Sequence
  Synthetically generated peptide
  VARIANT (1)..(17): Xaa = Any Amino Acid
ACEYCAXNXXPACTXGC

SEQ ID NO: 8958 - protein, 17 aa, Artificial Sequence
  Synthetically generated peptide
  VARIANT (1)..(17): Xaa = Any Amino Acid
ACEYCAXNXXPACTGXC

SEQ ID NO: 8959 - protein, 16 aa, Artificial Sequence
  Synthetically generated peptide
  VARIANT (1)..(16): Xaa = Any Amino Acid
ACEYCAXNXPXACTGC

SEQ ID NO: 8960 - protein, 17 aa, Artificial Sequence
  Synthetically generated peptide
  VARIANT (1)..(17): Xaa = Any Amino Acid
ACEYCAXNXPXXACTGC

SEQ ID NO: 8961 - protein, 17 aa, Artificial Sequence
  Synthetically generated peptide
  VARIANT (1)..(17): Xaa = Any Amino Acid
ACEYCAXNXPXAXCTGC

SEQ ID NO: 8962 - protein, 17 aa, Artificial Sequence
  Synthetically generated peptide
  VARIANT (1)..(17): Xaa = Any Amino Acid
ACEYCAXNXPXACXTGC

SEQ ID NO: 8963 - protein, 17 aa, Artificial Sequence
  Synthetically generated peptide
  VARIANT (1)..(17): Xaa = Any Amino Acid
ACEYCAXNXPXACTXGC

SEQ ID NO: 8964 - protein, 17 aa, Artificial Sequence
  Synthetically generated peptide
  VARIANT (1)..(17): Xaa = Any Amino Acid
ACEYCAXNXPXACTGXC

SEQ ID NO: 8965 - protein, 16 aa, Artificial Sequence
  Synthetically generated peptide
  VARIANT (1)..(16): Xaa = Any Amino Acid
ACEYCAXNXPAXCTGC

SEQ ID NO: 8966 - protein, 17 aa, Artificial Sequence
  Synthetically generated peptide
  VARIANT (1)..(17): Xaa = Any Amino Acid
ACEYCAXNXPAXXCTGC

SEQ ID NO: 8967 - protein, 17 aa, Artificial Sequence
  Synthetically generated peptide
  VARIANT (1)..(17): Xaa = Any Amino Acid
ACEYCAXNXPAXCXTGC

SEQ ID NO: 8968 - protein, 17 aa, Artificial Sequence
  Synthetically generated peptide
  VARIANT (1)..(17): Xaa = Any Amino Acid
ACEYCAXNXPAXCTXGC

SEQ ID NO: 8969 - protein, 17 aa, Artificial Sequence
  Synthetically generated peptide
  VARIANT (1)..(17): Xaa = Any Amino Acid
ACEYCAXNXPAXCTGXC

SEQ ID NO: 8970 - protein, 16 aa, Artificial Sequence
  Synthetically generated peptide
  VARIANT (1)..(16): Xaa = Any Amino Acid
ACEYCAXNXPACXTGC

SEQ ID NO: 8971 - protein, 17 aa, Artificial Sequence
  Synthetically generated peptide
  VARIANT (1)..(17): Xaa = Any Amino Acid
ACEYCAXNXPACXXTGC

SEQ ID NO: 8972 - protein, 17 aa, Artificial Sequence
  Synthetically generated peptide
  VARIANT (1)..(17): Xaa = Any Amino Acid
ACEYCAXNXPACXTXGC

SEQ ID NO: 8973 - protein, 17 aa, Artificial Sequence
  Synthetically generated peptide
  VARIANT (1)..(17): Xaa = Any Amino Acid
ACEYCAXNXPACXTGXC

SEQ ID NO: 8974 - protein, 16 aa, Artificial Sequence
  Synthetically generated peptide
  VARIANT (1)..(16): Xaa = Any Amino Acid
ACEYCAXNXPACTXGC

SEQ ID NO: 8975 - protein, 17 aa, Artificial Sequence
  Synthetically generated peptide
  VARIANT (1)..(17): Xaa = Any Amino Acid
ACEYCAXNXPACTXXGC

SEQ ID NO: 8976 - protein, 17 aa, Artificial Sequence
  Synthetically generated peptide
  VARIANT (1)..(17): Xaa = Any Amino Acid
ACEYCAXNXPACTXGXC

SEQ ID NO: 8977 - protein, 16 aa, Artificial Sequence
  Synthetically generated peptide
  VARIANT (1)..(16): Xaa = Any Amino Acid
ACEYCAXNXPACTGXC

SEQ ID NO: 8978 - protein, 17 aa, Artificial Sequence
  Synthetically generated peptide
  VARIANT (1)..(17): Xaa = Any Amino Acid
ACEYCAXNXPACTGXXC

SEQ ID NO: 8979 - protein, 15 aa, Artificial Sequence
  Synthetically generated peptide
  VARIANT (1)..(15): Xaa = Any Amino Acid
ACEYCAXNPXACTGC

SEQ ID NO: 8980 - protein, 16 aa, Artificial Sequence
  Synthetically generated peptide
  VARIANT (1)..(16): Xaa = Any Amino Acid
ACEYCAXNPXXACTGC

SEQ ID NO: 8981 - protein, 17 aa, Artificial Sequence
  Synthetically generated peptide
  VARIANT (1)..(17): Xaa = Any Amino Acid
ACEYCAXNPXXXACTGC

SEQ ID NO: 8982 - protein, 17 aa, Artificial Sequence
  Synthetically generated peptide
  VARIANT (1)..(17): Xaa = Any Amino Acid
ACEYCAXNPXXAXCTGC

SEQ ID NO: 8983 - protein, 17 aa, Artificial Sequence
  Synthetically generated peptide
  VARIANT (1)..(17): Xaa = Any Amino Acid
ACEYCAXNPXXACXTGC

SEQ ID NO: 8984 - protein, 17 aa, Artificial Sequence
  Synthetically generated peptide
  VARIANT (1)..(17): Xaa = Any Amino Acid
ACEYCAXNPXXACTXGC

SEQ ID NO: 8985 - protein, 17 aa, Artificial Sequence
  Synthetically generated peptide
  VARIANT (1)..(17): Xaa = Any Amino Acid
ACEYCAXNPXXACTGXC

SEQ ID NO: 8986 - protein, 16 aa, Artificial Sequence
  Synthetically generated peptide
  VARIANT (1)..(16): Xaa = Any Amino Acid
ACEYCAXNPXAXCTGC

SEQ ID NO: 8987 - protein, 17 aa, Artificial Sequence
  Synthetically generated peptide
  VARIANT (1)..(17): Xaa = Any Amino Acid
ACEYCAXNPXAXXCTGC

SEQ ID NO: 8988 - protein, 17 aa, Artificial Sequence
  Synthetically generated peptide
  VARIANT (1)..(17): Xaa = Any Amino Acid
ACEYCAXNPXAXCXTGC

SEQ ID NO: 8989 - protein, 17 aa, Artificial Sequence
  Synthetically generated peptide
  VARIANT (1)..(17): Xaa = Any Amino Acid
ACEYCAXNPXAXCTXGC

SEQ ID NO: 8990 - protein, 17 aa, Artificial Sequence
  Synthetically generated peptide
  VARIANT (1)..(17): Xaa = Any Amino Acid
ACEYCAXNPXAXCTGXC

SEQ ID NO: 8991 - protein, 16 aa, Artificial Sequence
  Synthetically generated peptide
  VARIANT (1)..(16): Xaa = Any Amino Acid
ACEYCAXNPXACXTGC

SEQ ID NO: 8992 - protein, 17 aa, Artificial Sequence
  Synthetically generated peptide
  VARIANT (1)..(17): Xaa = Any Amino Acid
ACEYCAXNPXACXXTGC

SEQ ID NO: 8993 - protein, 17 aa, Artificial Sequence
  Synthetically generated peptide
  VARIANT (1)..(17): Xaa = Any Amino Acid
ACEYCAXNPXACXTXGC

SEQ ID NO: 8994 - protein, 17 aa, Artificial Sequence
  Synthetically generated peptide
  VARIANT (1)..(17): Xaa = Any Amino Acid
ACEYCAXNPXACXTGXC

SEQ ID NO: 8995 - protein, 16 aa, Artificial Sequence
  Synthetically generated peptide
  VARIANT (1)..(16): Xaa = Any Amino Acid
ACEYCAXNPXACTXGC

SEQ ID NO: 8996 - protein, 17 aa, Artificial Sequence
  Synthetically generated peptide
  VARIANT (1)..(17): Xaa = Any Amino Acid
ACEYCAXNPXACTXXGC

SEQ ID NO: 8997 - protein, 17 aa, Artificial Sequence
  Synthetically generated peptide
  VARIANT (1)..(17): Xaa = Any Amino Acid
ACEYCAXNPXACTXGXC

SEQ ID NO: 8998 - protein, 16 aa, Artificial Sequence
  Synthetically generated peptide
  VARIANT (1)..(16): Xaa = Any Amino Acid
ACEYCAXNPXACTGXC

SEQ ID NO: 8999 - protein, 17 aa, Artificial Sequence
  Synthetically generated peptide
  VARIANT (1)..(17): Xaa = Any Amino Acid
ACEYCAXNPXACTGXXC

SEQ ID NO: 9000 - protein, 15 aa, Artificial Sequence
  Synthetically generated peptide
  VARIANT (1)..(15): Xaa = Any Amino Acid
ACEYCAXNPAXCTGC

SEQ ID NO: 9001 - protein, 16 aa, Artificial Sequence
  Synthetically generated peptide
  VARIANT (1)..(16): Xaa = Any Amino Acid
ACEYCAXNPAXXCTGC

SEQ ID NO: 9002 - protein, 17 aa, Artificial Sequence
  Synthetically generated peptide
  VARIANT (1)..(17): Xaa = Any Amino Acid
ACEYCAXNPAXXXCTGC

SEQ ID NO: 9003 - protein, 17 aa, Artificial Sequence
  Synthetically generated peptide
  VARIANT (1)..(17): Xaa = Any Amino Acid
ACEYCAXNPAXXCXTGC

SEQ ID NO: 9004 - protein, 17 aa, Artificial Sequence
  Synthetically generated peptide
  VARIANT (1)..(17): Xaa = Any Amino Acid
ACEYCAXNPAXXCTXGC

SEQ ID NO: 9005 - protein, 17 aa, Artificial Sequence
  Synthetically generated peptide
  VARIANT (1)..(17): Xaa = Any Amino Acid
ACEYCAXNPAXXCTGXC

SEQ ID NO: 9006 - protein, 16 aa, Artificial Sequence
  Synthetically generated peptide
  VARIANT (1)..(16): Xaa = Any Amino Acid
ACEYCAXNPAXCXTGC

SEQ ID NO: 9007 - protein, 17 aa, Artificial Sequence
  Synthetically generated peptide
  VARIANT (1)..(17): Xaa = Any Amino Acid
ACEYCAXNPAXCXXTGC

SEQ ID NO: 9008 - protein, 17 aa, Artificial Sequence
  Synthetically generated peptide
  VARIANT (1)..(17): Xaa = Any Amino Acid
ACEYCAXNPAXCXTXGC

SEQ ID NO: 9009 - protein, 17 aa, Artificial Sequence
  Synthetically generated peptide
  VARIANT (1)..(17): Xaa = Any Amino Acid
ACEYCAXNPAXCXTGXC

SEQ ID NO: 9010 - protein, 16 aa, Artificial Sequence
  Synthetically generated peptide
  VARIANT (1)..(16): Xaa = Any Amino Acid
ACEYCAXNPAXCTXGC

SEQ ID NO: 9011 - protein, 17 aa, Artificial Sequence
  Synthetically generated peptide
  VARIANT (1)..(17): Xaa = Any Amino Acid
ACEYCAXNPAXCTXXGC

SEQ ID NO: 9012 - protein, 17 aa, Artificial Sequence
  Synthetically generated peptide
  VARIANT (1)..(17): Xaa = Any Amino Acid
ACEYCAXNPAXCTXGXC

SEQ ID NO: 9013 - protein, 16 aa, Artificial Sequence
  Synthetically generated peptide
  VARIANT (1)..(16): Xaa = Any Amino Acid
ACEYCAXNPAXCTGXC

SEQ ID NO: 9014 - protein, 17 aa, Artificial Sequence
  Synthetically generated peptide
  VARIANT (1)..(17): Xaa = Any Amino Acid
ACEYCAXNPAXCTGXXC

SEQ ID NO: 9015 - protein, 15 aa, Artificial Sequence
  Synthetically generated peptide
  VARIANT (1)..(15): Xaa = Any Amino Acid
ACEYCAXNPACXTGC

SEQ ID NO: 9016 - protein, 16 aa, Artificial Sequence
  Synthetically generated peptide
  VARIANT (1)..(16): Xaa = Any Amino Acid
ACEYCAXNPACXXTGC

SEQ ID NO: 9017 - protein, 17 aa, Artificial Sequence
  Synthetically generated peptide
  VARIANT (1)..(17): Xaa = Any Amino Acid
ACEYCAXNPACXXXTGC

SEQ ID NO: 9018 - protein, 17 aa, Artificial Sequence
  Synthetically generated peptide
  VARIANT (1)..(17): Xaa = Any Amino Acid
ACEYCAXNPACXXTXGC

SEQ ID NO: 9019 - protein, 17 aa, Artificial Sequence
  Synthetically generated peptide
  VARIANT (1)..(17): Xaa = Any Amino Acid
ACEYCAXNPACXXTGXC

SEQ ID NO: 9020 - protein, 16 aa, Artificial Sequence
  Synthetically generated peptide
  VARIANT (1)..(16): Xaa = Any Amino Acid
ACEYCAXNPACXTXGC

SEQ ID NO: 9021 - protein, 17 aa, Artificial Sequence
  Synthetically generated peptide
  VARIANT (1)..(17): Xaa = Any Amino Acid
ACEYCAXNPACXTXXGC

SEQ ID NO: 9022 - protein, 17 aa, Artificial Sequence
  Synthetically generated peptide
  VARIANT (1)..(17): Xaa = Any Amino Acid
ACEYCAXNPACXTXGXC

SEQ ID NO: 9023 - protein, 16 aa, Artificial Sequence
  Synthetically generated peptide
  VARIANT (1)..(16): Xaa = Any Amino Acid
ACEYCAXNPACXTGXC

SEQ ID NO: 9024 - protein, 17 aa, Artificial Sequence
  Synthetically generated peptide
  VARIANT (1)..(17): Xaa = Any Amino Acid
ACEYCAXNPACXTGXXC

SEQ ID NO: 9025 - protein, 15 aa, Artificial Sequence
  Synthetically generated peptide
  VARIANT (1)..(15): Xaa = Any Amino Acid
ACEYCAXNPACTXGC

SEQ ID NO: 9026 - protein, 16 aa, Artificial Sequence
  Synthetically generated peptide
  VARIANT (1)..(16): Xaa = Any Amino Acid
ACEYCAXNPACTXXGC

SEQ ID NO: 9027 - protein, 17 aa, Artificial Sequence
  Synthetically generated peptide
  VARIANT (1)..(17): Xaa = Any Amino Acid
ACEYCAXNPACTXXXGC

SEQ ID NO: 9028 - protein, 17 aa, Artificial Sequence
  Synthetically generated peptide
  VARIANT (1)..(17): Xaa = Any Amino Acid
ACEYCAXNPACTXXGXC

SEQ ID NO: 9029 - protein, 16 aa, Artificial Sequence
  Synthetically generated peptide
  VARIANT (1)..(16): Xaa = Any Amino Acid
ACEYCAXNPACTXGXC

SEQ ID NO: 9030 - protein, 17 aa, Artificial Sequence
  Synthetically generated peptide
  VARIANT (1)..(17): Xaa = Any Amino Acid
ACEYCAXNPACTXGXXC

SEQ ID NO: 9031 - protein, 15 aa, Artificial Sequence
  Synthetically generated peptide
  VARIANT (1)..(15): Xaa = Any Amino Acid
ACEYCAXNPACTGXC

SEQ ID NO: 9032 - protein, 16 aa, Artificial Sequence
  Synthetically generated peptide
  VARIANT (1)..(16): Xaa = Any Amino Acid
ACEYCAXNPACTGXXC

SEQ ID NO: 9033 - protein, 17 aa, Artificial Sequence
  Synthetically generated peptide
  VARIANT (1)..(17): Xaa = Any Amino Acid
ACEYCAXNPACTGXXXC

SEQ ID NO: 9034 - protein, 14 aa, Artificial Sequence
  Synthetically generated peptide
  VARIANT (1)..(14): Xaa = Any Amino Acid
ACEYCANXPACTGC

SEQ ID NO: 9035 - protein, 15 aa, Artificial Sequence
  Synthetically generated peptide
  VARIANT (1)..(15): Xaa = Any Amino Acid
ACEYCANXXPACTGC

SEQ ID NO: 9036 - protein, 16 aa, Artificial Sequence
  Synthetically generated peptide
  VARIANT (1)..(16): Xaa = Any Amino Acid
ACEYCANXXXPACTGC

SEQ ID NO: 9037 - protein, 17 aa, Artificial Sequence
  Synthetically generated peptide
  VARIANT (1)..(17): Xaa = Any Amino Acid
ACEYCANXXXXPACTGC

SEQ ID NO: 9038 - protein, 17 aa, Artificial Sequence
  Synthetically generated peptide
  VARIANT (1)..(17): Xaa = Any Amino Acid
ACEYCANXXXPXACTGC

SEQ ID NO: 9039 - protein, 17 aa, Artificial Sequence
  Synthetically generated peptide
  VARIANT (1)..(17): Xaa = Any Amino Acid
ACEYCANXXXPAXCTGC

SEQ ID NO: 9040 - protein, 17 aa, Artificial Sequence
  Synthetically generated peptide
  VARIANT (1)..(17): Xaa = Any Amino Acid
ACEYCANXXXPACXTGC

SEQ ID NO: 9041 - protein, 17 aa, Artificial Sequence
  Synthetically generated peptide
  VARIANT (1)..(17): Xaa = Any Amino Acid
ACEYCANXXXPACTXGC

SEQ ID NO: 9042 - protein, 17 aa, Artificial Sequence
  Synthetically generated peptide
  VARIANT (1)..(17): Xaa = Any Amino Acid
ACEYCANXXXPACTGXC

SEQ ID NO: 9043 - protein, 16 aa, Artificial Sequence
  Synthetically generated peptide
  VARIANT (1)..(16): Xaa = Any Amino Acid
ACEYCANXXPXACTGC

SEQ ID NO: 9044 - protein, 17 aa, Artificial Sequence
  Synthetically generated peptide
  VARIANT (1)..(17): Xaa = Any Amino Acid
ACEYCANXXPXXACTGC

SEQ ID NO: 9045 - protein, 17 aa, Artificial Sequence
  Synthetically generated peptide
  VARIANT (1)..(17): Xaa = Any Amino Acid
ACEYCANXXPXAXCTGC

SEQ ID NO: 9046 - protein, 17 aa, Artificial Sequence
  Synthetically generated peptide
  VARIANT (1)..(17): Xaa = Any Amino Acid
ACEYCANXXPXACXTGC

SEQ ID NO: 9047 - protein, 17 aa, Artificial Sequence
  Synthetically generated peptide
  VARIANT (1)..(17): Xaa = Any Amino Acid
ACEYCANXXPXACTXGC

SEQ ID NO: 9048 - protein, 17 aa, Artificial Sequence
  Synthetically generated peptide
  VARIANT (1)..(17): Xaa = Any Amino Acid
ACEYCANXXPXACTGXC

SEQ ID NO: 9049 - protein, 16 aa, Artificial Sequence
  Synthetically generated peptide
  VARIANT (1)..(16): Xaa = Any Amino Acid
ACEYCANXXPAXCTGC

SEQ ID NO: 9050 - protein, 17 aa, Artificial Sequence
  Synthetically generated peptide
  VARIANT (1)..(17): Xaa = Any Amino Acid
ACEYCANXXPAXXCTGC

SEQ ID NO: 9051 - protein, 17 aa, Artificial Sequence
  Synthetically generated peptide
  VARIANT (1)..(17): Xaa = Any Amino Acid
ACEYCANXXPAXCXTGC

SEQ ID NO: 9052 - protein, 17 aa, Artificial Sequence
  Synthetically generated peptide
  VARIANT (1)..(17): Xaa = Any Amino Acid
ACEYCANXXPAXCTXGC

SEQ ID NO: 9053 - protein, 17 aa, Artificial Sequence
  Synthetically generated peptide
  VARIANT (1)..(17): Xaa = Any Amino Acid
ACEYCANXXPAXCTGXC

SEQ ID NO: 9054 - protein, 16 aa, Artificial Sequence
  Synthetically generated peptide
  VARIANT (1)..(16): Xaa = Any Amino Acid
ACEYCANXXPACXTGC

SEQ ID NO: 9055 - protein, 17 aa, Artificial Sequence
  Synthetically generated peptide
  VARIANT (1)..(17): Xaa = Any Amino Acid
ACEYCANXXPACXXTGC

SEQ ID NO: 9056 - protein, 17 aa, Artificial Sequence
  Synthetically generated peptide
  VARIANT (1)..(17): Xaa = Any Amino Acid
ACEYCANXXPACXTXGC

SEQ ID NO: 9057 - protein, 17 aa, Artificial Sequence
  Synthetically generated peptide
  VARIANT (1)..(17): Xaa = Any Amino Acid
ACEYCANXXPACXTGXC

SEQ ID NO: 9058 - protein, 16 aa, Artificial Sequence
  Synthetically generated peptide
  VARIANT (1)..(16): Xaa = Any Amino Acid
ACEYCANXXPACTXGC

SEQ ID NO: 9059 - protein, 17 aa, Artificial Sequence
  Synthetically generated peptide
  VARIANT (1)..(17): Xaa = Any Amino Acid
ACEYCANXXPACTXXGC

SEQ ID NO: 9060 - protein, 17 aa, Artificial Sequence
  Synthetically generated peptide
  VARIANT (1)..(17): Xaa = Any Amino Acid
ACEYCANXXPACTXGXC

SEQ ID NO: 9061 - protein, 16 aa, Artificial Sequence
  Synthetically generated peptide
  VARIANT (1)..(16): Xaa = Any Amino Acid
ACEYCANXXPACTGXC

SEQ ID NO: 9062 - protein, 17 aa, Artificial Sequence
  Synthetically generated peptide
  VARIANT (1)..(17): Xaa = Any Amino Acid
ACEYCANXXPACTGXXC

SEQ ID NO: 9063 - protein, 15 aa, Artificial Sequence
  Synthetically generated peptide
  VARIANT (1)..(15): Xaa = Any Amino Acid
ACEYCANXPXACTGC

SEQ ID NO: 9064 - protein, 16 aa, Artificial Sequence
  Synthetically generated peptide
  VARIANT (1)..(16): Xaa = Any Amino Acid
ACEYCANXPXXACTGC

SEQ ID NO: 9065 - protein, 17 aa, Artificial Sequence
  Synthetically generated peptide
  VARIANT (1)..(17): Xaa = Any Amino Acid
ACEYCANXPXXXACTGC

SEQ ID NO: 9066 - protein, 17 aa, Artificial Sequence
  Synthetically generated peptide
  VARIANT (1)..(17): Xaa = Any Amino Acid
ACEYCANXPXXAXCTGC

SEQ ID NO: 9067 - protein, 17 aa, Artificial Sequence
  Synthetically generated peptide
  VARIANT (1)..(17): Xaa = Any Amino Acid
ACEYCANXPXXACXTGC

SEQ ID NO: 9068 - protein, 17 aa, Artificial Sequence
  Synthetically generated peptide
  VARIANT (1)..(17): Xaa = Any Amino Acid
ACEYCANXPXXACTXGC

SEQ ID NO: 9069 - protein, 17 aa, Artificial Sequence
  Synthetically generated peptide
  VARIANT (1)..(17): Xaa = Any Amino Acid
ACEYCANXPXXACTGXC

SEQ ID NO: 9070 - protein, 16 aa, Artificial Sequence
  Synthetically generated peptide
  VARIANT (1)..(16): Xaa = Any Amino Acid
ACEYCANXPXAXCTGC

SEQ ID NO: 9071 - protein, 17 aa, Artificial Sequence
  Synthetically generated peptide
  VARIANT (1)..(17): Xaa = Any Amino Acid
ACEYCANXPXAXXCTGC

SEQ ID NO: 9072 - protein, 17 aa, Artificial Sequence
  Synthetically generated peptide
  VARIANT (1)..(17): Xaa = Any Amino Acid
ACEYCANXPXAXCXTGC

SEQ ID NO: 9073 - protein, 17 aa, Artificial Sequence
  Synthetically generated peptide
  VARIANT (1)..(17): Xaa = Any Amino Acid
ACEYCANXPXAXCTXGC

SEQ ID NO: 9074 - protein, 17 aa, Artificial Sequence
  Synthetically generated peptide
  VARIANT (1)..(17): Xaa = Any Amino Acid
ACEYCANXPXAXCTGXC

SEQ ID NO: 9075 - protein, 16 aa, Artificial Sequence
  Synthetically generated peptide
  VARIANT (1)..(16): Xaa = Any Amino Acid
ACEYCANXPXACXTGC

SEQ ID NO: 9076 - protein, 17 aa, Artificial Sequence
  Synthetically generated peptide
  VARIANT (1)..(17): Xaa = Any Amino Acid
ACEYCANXPXACXXTGC

SEQ ID NO: 9077 - protein, 17 aa, Artificial Sequence
  Synthetically generated peptide
  VARIANT (1)..(17): Xaa = Any Amino Acid
ACEYCANXPXACXTXGC

SEQ ID NO: 9078 - protein, 17 aa, Artificial Sequence
  Synthetically generated peptide
  VARIANT (1)..(17): Xaa = Any Amino Acid
ACEYCANXPXACXTGXC

SEQ ID NO: 9079 - protein, 16 aa, Artificial Sequence
  Synthetically generated peptide
  VARIANT (1)..(16): Xaa = Any Amino Acid
ACEYCANXPXACTXGC

SEQ ID NO: 9080 - protein, 17 aa, Artificial Sequence
  Synthetically generated peptide
  VARIANT (1)..(17): Xaa = Any Amino Acid
ACEYCANXPXACTXXGC

SEQ ID NO: 9081 - protein, 17 aa, Artificial Sequence
  Synthetically generated peptide
  VARIANT (1)..(17): Xaa = Any Amino Acid
ACEYCANXPXACTXGXC

SEQ ID NO: 9082 - protein, 16 aa, Artificial Sequence
  Synthetically generated peptide
  VARIANT (1)..(16): Xaa = Any Amino Acid
ACEYCANXPXACTGXC

SEQ ID NO: 9083 - protein, 17 aa, Artificial Sequence
  Synthetically generated peptide
  VARIANT (1)..(17): Xaa = Any Amino Acid
ACEYCANXPXACTGXXC

SEQ ID NO: 9084 - protein, 15 aa, Artificial Sequence
  Synthetically generated peptide
  VARIANT (1)..(15): Xaa = Any Amino Acid
ACEYCANXPAXCTGC

SEQ ID NO: 9085 - protein, 16 aa, Artificial Sequence
  Synthetically generated peptide
  VARIANT (1)..(16): Xaa = Any Amino Acid
ACEYCANXPAXXCTGC

SEQ ID NO: 9086 - protein, 17 aa, Artificial Sequence
  Synthetically generated peptide
  VARIANT (1)..(17): Xaa = Any Amino Acid
ACEYCANXPAXXXCTGC

SEQ ID NO: 9087 - protein, 17 aa, Artificial Sequence
  Synthetically generated peptide
  VARIANT (1)..(17): Xaa = Any Amino Acid
ACEYCANXPAXXCXTGC

SEQ ID NO: 9088 - protein, 17 aa, Artificial Sequence
  Synthetically generated peptide
  VARIANT (1)..(17): Xaa = Any Amino Acid
ACEYCANXPAXXCTXGC

SEQ ID NO: 9089 - protein, 17 aa, Artificial Sequence
  Synthetically generated peptide
  VARIANT (1)..(17): Xaa = Any Amino Acid
ACEYCANXPAXXCTGXC

SEQ ID NO: 9090 - protein, 16 aa, Artificial Sequence
  Synthetically generated peptide
  VARIANT (1)..(16): Xaa = Any Amino Acid
ACEYCANXPAXCXTGC

SEQ ID NO: 9091 - protein, 17 aa, Artificial Sequence
  Synthetically generated peptide
  VARIANT (1)..(17): Xaa = Any Amino Acid
ACEYCANXPAXCXXTGC

SEQ ID NO: 9092 - protein, 17 aa, Artificial Sequence
  Synthetically generated peptide
  VARIANT (1)..(17): Xaa = Any Amino Acid
ACEYCANXPAXCXTXGC

SEQ ID NO: 9093 - protein, 17 aa, Artificial Sequence
  Synthetically generated peptide
  VARIANT (1)..(17): Xaa = Any Amino Acid
ACEYCANXPAXCXTGXC

SEQ ID NO: 9094 - protein, 16 aa, Artificial Sequence
  Synthetically generated peptide
  VARIANT (1)..(16): Xaa = Any Amino Acid
ACEYCANXPAXCTXGC

SEQ ID NO: 9095 - protein, 17 aa, Artificial Sequence
  Synthetically generated peptide
  VARIANT (1)..(17): Xaa = Any Amino Acid
ACEYCANXPAXCTXXGC

SEQ ID NO: 9096 - protein, 17 aa, Artificial Sequence
  Synthetically generated peptide
  VARIANT (1)..(17): Xaa = Any Amino Acid
ACEYCANXPAXCTXGXC

SEQ ID NO: 9097 - protein, 16 aa, Artificial Sequence
  Synthetically generated peptide
  VARIANT (1)..(16): Xaa = Any Amino Acid
ACEYCANXPAXCTGXC

SEQ ID NO: 9098 - protein, 17 aa, Artificial Sequence
  Synthetically generated peptide
  VARIANT (1)..(17): Xaa = Any Amino Acid
ACEYCANXPAXCTGXXC

SEQ ID NO: 9099 - protein, 15 aa, Artificial Sequence
  Synthetically generated peptide
  VARIANT (1)..(15): Xaa = Any Amino Acid
ACEYCANXPACXTGC

SEQ ID NO: 9100 - protein, 16 aa, Artificial Sequence
  Synthetically generated peptide
  VARIANT (1)..(16): Xaa = Any Amino Acid
ACEYCANXPACXXTGC

SEQ ID NO: 9101 - protein, 17 aa, Artificial Sequence
  Synthetically generated peptide
  VARIANT (1)..(17): Xaa = Any Amino Acid
ACEYCANXPACXXXTGC

SEQ ID NO: 9102 - protein, 17 aa, Artificial Sequence
  Synthetically generated peptide
  VARIANT (1)..(17): Xaa = Any Amino Acid
ACEYCANXPACXXTXGC

SEQ ID NO: 9103 - protein, 17 aa, Artificial Sequence
  Synthetically generated peptide
  VARIANT (1)..(17): Xaa = Any Amino Acid
ACEYCANXPACXXTGXC

SEQ ID NO: 9104 - protein, 16 aa, Artificial Sequence
  Synthetically generated peptide
  VARIANT (1)..(16): Xaa = Any Amino Acid
ACEYCANXPACXTXGC

SEQ ID NO: 9105 - protein, 17 aa, Artificial Sequence
  Synthetically generated peptide
  VARIANT (1)..(17): Xaa = Any Amino Acid
ACEYCANXPACXTXXGC

SEQ ID NO: 9106 - protein, 17 aa, Artificial Sequence
  Synthetically generated peptide
  VARIANT (1)..(17): Xaa = Any Amino Acid
ACEYCANXPACXTXGXC

SEQ ID NO: 9107 - protein, 16 aa, Artificial Sequence
  Synthetically generated peptide
  VARIANT (1)..(16): Xaa = Any Amino Acid
ACEYCANXPACXTGXC

SEQ ID NO: 9108 - protein, 17 aa, Artificial Sequence
  Synthetically generated peptide
  VARIANT (1)..(17): Xaa = Any Amino Acid
ACEYCANXPACXTGXXC

SEQ ID NO: 9109 - protein, 15 aa, Artificial Sequence
  Synthetically generated peptide
  VARIANT (1)..(15): Xaa = Any Amino Acid
ACEYCANXPACTXGC

SEQ ID NO: 9110 - protein, 16 aa, Artificial Sequence
  Synthetically generated peptide
  VARIANT (1)..(16): Xaa = Any Amino Acid
ACEYCANXPACTXXGC

SEQ ID NO: 9111 - protein, 17 aa, Artificial Sequence
  Synthetically generated peptide
  VARIANT (1)..(17): Xaa = Any Amino Acid
ACEYCANXPACTXXXGC

SEQ ID NO: 9112 - protein, 17 aa, Artificial Sequence
  Synthetically generated peptide
  VARIANT (1)..(17): Xaa = Any Amino Acid
ACEYCANXPACTXXGXC

SEQ ID NO: 9113 - protein, 16 aa, Artificial Sequence
  Synthetically generated peptide
  VARIANT (1)..(16): Xaa = Any Amino Acid
ACEYCANXPACTXGXC

SEQ ID NO: 9114 - protein, 17 aa, Artificial Sequence
  Synthetically generated peptide
  VARIANT (1)..(17): Xaa = Any Amino Acid
ACEYCANXPACTXGXXC

SEQ ID NO: 9115 - protein, 15 aa, Artificial Sequence
  Synthetically generated peptide
  VARIANT (1)..(15): Xaa = Any Amino Acid
ACEYCANXPACTGXC

SEQ ID NO: 9116 - protein, 16 aa, Artificial Sequence
  Synthetically generated peptide
  VARIANT (1)..(16): Xaa = Any Amino Acid
ACEYCANXPACTGXXC

SEQ ID NO: 9117 - protein, 17 aa, Artificial Sequence
  Synthetically generated peptide
  VARIANT (1)..(17): Xaa = Any Amino Acid
ACEYCANXPACTGXXXC

SEQ ID NO: 9118 - protein, 14 aa, Artificial Sequence
  Synthetically generated peptide
  VARIANT (1)..(14): Xaa = Any Amino Acid
ACEYCANPXACTGC

SEQ ID NO: 9119 - protein, 15 aa, Artificial Sequence
  Synthetically generated peptide
  VARIANT (1)..(15): Xaa = Any Amino Acid
ACEYCANPXXACTGC

SEQ ID NO: 9120 - protein, 16 aa, Artificial Sequence
  Synthetically generated peptide
  VARIANT (1)..(16): Xaa = Any Amino Acid
ACEYCANPXXXACTGC

SEQ ID NO: 9121 - protein, 17 aa, Artificial Sequence
  Synthetically generated peptide
  VARIANT (1)..(17): Xaa = Any Amino Acid
ACEYCANPXXXXACTGC

SEQ ID NO: 9122 - protein, 17 aa, Artificial Sequence
  Synthetically generated peptide
  VARIANT (1)..(17): Xaa = Any Amino Acid
ACEYCANPXXXAXCTGC

SEQ ID NO: 9123 - protein, 17 aa, Artificial Sequence
  Synthetically generated peptide
  VARIANT (1)..(17): Xaa = Any Amino Acid
ACEYCANPXXXACXTGC

SEQ ID NO: 9124 - protein, 17 aa, Artificial Sequence
  Synthetically generated peptide
  VARIANT (1)..(17): Xaa = Any Amino Acid
ACEYCANPXXXACTXGC

SEQ ID NO: 9125 - protein, 17 aa, Artificial Sequence
  Synthetically generated peptide
  VARIANT (1)..(17): Xaa = Any Amino Acid
ACEYCANPXXXACTGXC

SEQ ID NO: 9126 - protein, 16 aa, Artificial Sequence
  Synthetically generated peptide
  VARIANT (1)..(16): Xaa = Any Amino Acid
ACEYCANPXXAXCTGC

SEQ ID NO: 9127 - protein, 17 aa, Artificial Sequence
  Synthetically generated peptide
  VARIANT (1)..(17): Xaa = Any Amino Acid
ACEYCANPXXAXXCTGC

SEQ ID NO: 9128 - protein, 17 aa, Artificial Sequence
  Synthetically generated peptide
  VARIANT (1)..(17): Xaa = Any Amino Acid
ACEYCANPXXAXCXTGC

SEQ ID NO: 9129 - protein, 17 aa, Artificial Sequence
  Synthetically generated peptide
  VARIANT (1)..(17): Xaa = Any Amino Acid
ACEYCANPXXAXCTXGC

SEQ ID NO: 9130 - protein, 17 aa, Artificial Sequence
  Synthetically generated peptide
  VARIANT (1)..(17): Xaa = Any Amino Acid
ACEYCANPXXAXCTGXC

SEQ ID NO: 9131 - protein, 16 aa, Artificial Sequence
  Synthetically generated peptide
  VARIANT (1)..(16): Xaa = Any Amino Acid
ACEYCANPXXACXTGC

SEQ ID NO: 9132 - protein, 17 aa, Artificial Sequence
  Synthetically generated peptide
  VARIANT (1)..(17): Xaa = Any Amino Acid
ACEYCANPXXACXXTGC

SEQ ID NO: 9133 - protein, 17 aa, Artificial Sequence
  Synthetically generated peptide
  VARIANT (1)..(17): Xaa = Any Amino Acid
ACEYCANPXXACXTXGC

SEQ ID NO: 9134 - protein, 17 aa, Artificial Sequence
  Synthetically generated peptide
  VARIANT (1)..(17): Xaa = Any Amino Acid
ACEYCANPXXACXTGXC

SEQ ID NO: 9135 - protein, 16 aa, Artificial Sequence
  Synthetically generated peptide
  VARIANT (1)..(16): Xaa = Any Amino Acid
ACEYCANPXXACTXGC

SEQ ID NO: 9136 - protein, 17 aa, Artificial Sequence
  Synthetically generated peptide
  VARIANT (1)..(17): Xaa = Any Amino Acid
ACEYCANPXXACTXXGC

SEQ ID NO: 9137 - protein, 17 aa, Artificial Sequence
  Synthetically generated peptide
  VARIANT (1)..(17): Xaa = Any Amino Acid
ACEYCANPXXACTXGXC

SEQ ID NO: 9138 - protein, 16 aa, Artificial Sequence
  Synthetically generated peptide
  VARIANT (1)..(16): Xaa = Any Amino Acid
ACEYCANPXXACTGXC

SEQ ID NO: 9139 - protein, 17 aa, Artificial Sequence
  Synthetically generated peptide
  VARIANT (1)..(17): Xaa = Any Amino Acid
ACEYCANPXXACTGXXC

SEQ ID NO: 9140 - protein, 15 aa, Artificial Sequence
  Synthetically generated peptide
  VARIANT (1)..(15): Xaa = Any Amino Acid
ACEYCANPXAXCTGC

SEQ ID NO: 9141 - protein, 16 aa, Artificial Sequence
  Synthetically generated peptide
  VARIANT (1)..(16): Xaa = Any Amino Acid
ACEYCANPXAXXCTGC

SEQ ID NO: 9142 - protein, 17 aa, Artificial Sequence
  Synthetically generated peptide
  VARIANT (1)..(17): Xaa = Any Amino Acid
ACEYCANPXAXXXCTGC

SEQ ID NO: 9143 - protein, 17 aa, Artificial Sequence
  Synthetically generated peptide
  VARIANT (1)..(17): Xaa = Any Amino Acid
ACEYCANPXAXXCXTGC

SEQ ID NO: 9144 - protein, 17 aa, Artificial Sequence
  Synthetically generated peptide
  VARIANT (1)..(17): Xaa = Any Amino Acid
ACEYCANPXAXXCTXGC

SEQ ID NO: 9145 - protein, 17 aa, Artificial Sequence
  Synthetically generated peptide
  VARIANT (1)..(17): Xaa = Any Amino Acid
ACEYCANPXAXXCTGXC

SEQ ID NO: 9146 - protein, 16 aa, Artificial Sequence
  Synthetically generated peptide
  VARIANT (1)..(16): Xaa = Any Amino Acid
ACEYCANPXAXCXTGC

SEQ ID NO: 9147 - protein, 17 aa, Artificial Sequence
  Synthetically generated peptide
  VARIANT (1)..(17): Xaa = Any Amino Acid
ACEYCANPXAXCXXTGC

SEQ ID NO: 9148 - protein, 17 aa, Artificial Sequence
  Synthetically generated peptide
  VARIANT (1)..(17): Xaa = Any Amino Acid
ACEYCANPXAXCXTXGC

SEQ ID NO: 9149 - protein, 17 aa, Artificial Sequence
  Synthetically generated peptide
  VARIANT (1)..(17): Xaa = Any Amino Acid
ACEYCANPXAXCXTGXC

SEQ ID NO: 9150 - protein, 16 aa, Artificial Sequence
  Synthetically generated peptide
  VARIANT (1)..(16): Xaa = Any Amino Acid
ACEYCANPXAXCTXGC

SEQ ID NO: 9151 - protein, 17 aa, Artificial Sequence
  Synthetically generated peptide
  VARIANT (1)..(17): Xaa = Any Amino Acid
ACEYCANPXAXCTXXGC

SEQ ID NO: 9152 - protein, 17 aa, Artificial Sequence
  Synthetically generated peptide
  VARIANT (1)..(17): Xaa = Any Amino Acid
ACEYCANPXAXCTXGXC

SEQ ID NO: 9153 - protein, 16 aa, Artificial Sequence
  Synthetically generated peptide
  VARIANT (1)..(16): Xaa = Any Amino Acid
ACEYCANPXAXCTGXC

SEQ ID NO: 9154 - protein, 17 aa, Artificial Sequence
  Synthetically generated peptide
  VARIANT (1)..(17): Xaa = Any Amino Acid
ACEYCANPXAXCTGXXC

SEQ ID NO: 9155 - protein, 15 aa, Artificial Sequence
  Synthetically generated peptide
  VARIANT (1)..(15): Xaa = Any Amino Acid
ACEYCANPXACXTGC

SEQ ID NO: 9156 - protein, 16 aa, Artificial Sequence
  Synthetically generated peptide
  VARIANT (1)..(16): Xaa = Any Amino Acid
ACEYCANPXACXXTGC

SEQ ID NO: 9157 - protein, 17 aa, Artificial Sequence
  Synthetically generated peptide
  VARIANT (1)..(17): Xaa = Any Amino Acid
ACEYCANPXACXXXTGC

SEQ ID NO: 9158 - protein, 17 aa, Artificial Sequence
  Synthetically generated peptide
  VARIANT (1)..(17): Xaa = Any Amino Acid
ACEYCANPXACXXTXGC

SEQ ID NO: 9159 - protein, 17 aa, Artificial Sequence
  Synthetically generated peptide
  VARIANT (1)..(17): Xaa = Any Amino Acid
ACEYCANPXACXXTGXC

SEQ ID NO: 9160 - protein, 16 aa, Artificial Sequence
  Synthetically generated peptide
  VARIANT (1)..(16): Xaa = Any Amino Acid
ACEYCANPXACXTXGC

SEQ ID NO: 9161 - protein, 17 aa, Artificial Sequence
  Synthetically generated peptide
  VARIANT (1)..(17): Xaa = Any Amino Acid
ACEYCANPXACXTXXGC

SEQ ID NO: 9162 - protein, 17 aa, Artificial Sequence
  Synthetically generated peptide
  VARIANT (1)..(17): Xaa = Any Amino Acid
ACEYCANPXACXTXGXC

SEQ ID NO: 9163 - protein, 16 aa, Artificial Sequence
  Synthetically generated peptide
  VARIANT (1)..(16): Xaa = Any Amino Acid
ACEYCANPXACXTGXC

SEQ ID NO: 9164 - protein, 17 aa, Artificial Sequence
  Synthetically generated peptide
  VARIANT (1)..(17): Xaa = Any Amino Acid
ACEYCANPXACXTGXXC

SEQ ID NO: 9165 - protein, 15 aa, Artificial Sequence
  Synthetically generated peptide
  VARIANT (1)..(15): Xaa = Any Amino Acid
ACEYCANPXACTXGC

SEQ ID NO: 9166 - protein, 16 aa, Artificial Sequence
  Synthetically generated peptide
  VARIANT (1)..(16): Xaa = Any Amino Acid
ACEYCANPXACTXXGC

SEQ ID NO: 9167 - protein, 17 aa, Artificial Sequence
  Synthetically generated peptide
  VARIANT (1)..(17): Xaa = Any Amino Acid
ACEYCANPXACTXXXGC

SEQ ID NO: 9168 - protein, 17 aa, Artificial Sequence
  Synthetically generated peptide
  VARIANT (1)..(17): Xaa = Any Amino Acid
ACEYCANPXACTXXGXC

SEQ ID NO: 9169 - protein, 16 aa, Artificial Sequence
  Synthetically generated peptide
  VARIANT (1)..(16): Xaa = Any Amino Acid
ACEYCANPXACTXGXC

SEQ ID NO: 9170 - protein, 17 aa, Artificial Sequence
  Synthetically generated peptide
  VARIANT (1)..(17): Xaa = Any Amino Acid
ACEYCANPXACTXGXXC

SEQ ID NO: 9171 - protein, 15 aa, Artificial Sequence
  Synthetically generated peptide
  VARIANT (1)..(15): Xaa = Any Amino Acid
ACEYCANPXACTGXC

SEQ ID NO: 9172 - protein, 16 aa, Artificial Sequence
  Synthetically generated peptide
  VARIANT (1)..(16): Xaa = Any Amino Acid
ACEYCANPXACTGXXC

SEQ ID NO: 9173 - protein, 17 aa, Artificial Sequence
  Synthetically generated peptide
  VARIANT (1)..(17): Xaa = Any Amino Acid
ACEYCANPXACTGXXXC

SEQ ID NO: 9174 - protein, 14 aa, Artificial Sequence
  Synthetically generated peptide
  VARIANT (1)..(14): Xaa = Any Amino Acid
ACEYCANPAXCTGC

SEQ ID NO: 9175 - protein, 15 aa, Artificial Sequence
  Synthetically generated peptide
  VARIANT (1)..(15): Xaa = Any Amino Acid
ACEYCANPAXXCTGC

SEQ ID NO: 9176 - protein, 16 aa, Artificial Sequence
  Synthetically generated peptide
  VARIANT (1)..(16): Xaa = Any Amino Acid
ACEYCANPAXXXCTGC

SEQ ID NO: 9177 - protein, 17 aa, Artificial Sequence
  Synthetically generated peptide
  VARIANT (1)..(17): Xaa = Any Amino Acid
ACEYCANPAXXXXCTGC

SEQ ID NO: 9178 - protein, 17 aa, Artificial Sequence
  Synthetically generated peptide
  VARIANT (1)..(17): Xaa = Any Amino Acid
ACEYCANPAXXXCXTGC

SEQ ID NO: 9179 - protein, 17 aa, Artificial Sequence
  Synthetically generated peptide
  VARIANT (1)..(17): Xaa = Any Amino Acid
ACEYCANPAXXXCTXGC

SEQ ID NO: 9180 - protein, 17 aa, Artificial Sequence
  Synthetically generated peptide
  VARIANT (1)..(17): Xaa = Any Amino Acid
ACEYCANPAXXXCTGXC

SEQ ID NO: 9181 - protein, 16 aa, Artificial Sequence
  Synthetically generated peptide
  VARIANT (1)..(16): Xaa = Any Amino Acid
ACEYCANPAXXCXTGC

SEQ ID NO: 9182 - protein, 17 aa, Artificial Sequence
  Synthetically generated peptide
  VARIANT (1)..(17): Xaa = Any Amino Acid
ACEYCANPAXXCXXTGC

SEQ ID NO: 9183 - protein, 17 aa, Artificial Sequence
  Synthetically generated peptide
  VARIANT (1)..(17): Xaa = Any Amino Acid
ACEYCANPAXXCXTXGC

SEQ ID NO: 9184 - protein, 17 aa, Artificial Sequence
  Synthetically generated peptide
  VARIANT (1)..(17): Xaa = Any Amino Acid
ACEYCANPAXXCXTGXC

SEQ ID NO: 9185 - protein, 16 aa, Artificial Sequence
  Synthetically generated peptide
  VARIANT (1)..(16): Xaa = Any Amino Acid
ACEYCANPAXXCTXGC

SEQ ID NO: 9186 - protein, 17 aa, Artificial Sequence
  Synthetically generated peptide
  VARIANT (1)..(17): Xaa = Any Amino Acid
ACEYCANPAXXCTXXGC

SEQ ID NO: 9187 - protein, 17 aa, Artificial Sequence
  Synthetically generated peptide
  VARIANT (1)..(17): Xaa = Any Amino Acid
ACEYCANPAXXCTXGXC

SEQ ID NO: 9188 - protein, 16 aa, Artificial Sequence
  Synthetically generated peptide
  VARIANT (1)..(16): Xaa = Any Amino Acid
ACEYCANPAXXCTGXC

SEQ ID NO: 9189 - protein, 17 aa, Artificial Sequence
  Synthetically generated peptide
  VARIANT (1)..(17): Xaa = Any Amino Acid
ACEYCANPAXXCTGXXC

SEQ ID NO: 9190 - protein, 15 aa, Artificial Sequence
  Synthetically generated peptide
  VARIANT (1)..(15): Xaa = Any Amino Acid
ACEYCANPAXCXTGC

SEQ ID NO: 9191 - protein, 16 aa, Artificial Sequence
  Synthetically generated peptide
  VARIANT (1)..(16): Xaa = Any Amino Acid
ACEYCANPAXCXXTGC

SEQ ID NO: 9192 - protein, 17 aa, Artificial Sequence
  Synthetically generated peptide
  VARIANT (1)..(17): Xaa = Any Amino Acid
ACEYCANPAXCXXXTGC

SEQ ID NO: 9193 - protein, 17 aa, Artificial Sequence
  Synthetically generated peptide
  VARIANT (1)..(17): Xaa = Any Amino Acid
ACEYCANPAXCXXTXGC

SEQ ID NO: 9194 - protein, 17 aa, Artificial Sequence
  Synthetically generated peptide
  VARIANT (1)..(17): Xaa = Any Amino Acid
ACEYCANPAXCXXTGXC

SEQ ID NO: 9195 - protein, 16 aa, Artificial Sequence
  Synthetically generated peptide
  VARIANT (1)..(16): Xaa = Any Amino Acid
ACEYCANPAXCXTXGC

SEQ ID NO: 9196 - protein, 17 aa, Artificial Sequence
  Synthetically generated peptide
  VARIANT (1)..(17): Xaa = Any Amino Acid
ACEYCANPAXCXTXXGC

SEQ ID NO: 9197 - protein, 17 aa, Artificial Sequence
  Synthetically generated peptide
  VARIANT (1)..(17): Xaa = Any Amino Acid
ACEYCANPAXCXTXGXC

SEQ ID NO: 9198 - protein, 16 aa, Artificial Sequence
  Synthetically generated peptide
  VARIANT (1)..(16): Xaa = Any Amino Acid
ACEYCANPAXCXTGXC

SEQ ID NO: 9199 - protein, 17 aa, Artificial Sequence
  Synthetically generated peptide
  VARIANT (1)..(17): Xaa = Any Amino Acid
ACEYCANPAXCXTGXXC

SEQ ID NO: 9200 - protein, 15 aa, Artificial Sequence
  Synthetically generated peptide
  VARIANT (1)..(15): Xaa = Any Amino Acid
ACEYCANPAXCTXGC

SEQ ID NO: 9201 - protein, 16 aa, Artificial Sequence
  Synthetically generated peptide
  VARIANT (1)..(16): Xaa = Any Amino Acid
ACEYCANPAXCTXXGC

SEQ ID NO: 9202 - protein, 17 aa, Artificial Sequence
  Synthetically generated peptide
  VARIANT (1)..(17): Xaa = Any Amino Acid
ACEYCANPAXCTXXXGC

SEQ ID NO: 9203 - protein, 17 aa, Artificial Sequence
  Synthetically generated peptide
  VARIANT (1)..(17): Xaa = Any Amino Acid
ACEYCANPAXCTXXGXC

SEQ ID NO: 9204 - protein, 16 aa, Artificial Sequence
  Synthetically generated peptide
  VARIANT (1)..(16): Xaa = Any Amino Acid
ACEYCANPAXCTXGXC

SEQ ID NO: 9205 - protein, 17 aa, Artificial Sequence
  Synthetically generated peptide
  VARIANT (1)..(17): Xaa = Any Amino Acid
ACEYCANPAXCTXGXXC

SEQ ID NO: 9206 - protein, 15 aa, Artificial Sequence
  Synthetically generated peptide
  VARIANT (1)..(15): Xaa = Any Amino Acid
ACEYCANPAXCTGXC

SEQ ID NO: 9207 - protein, 16 aa, Artificial Sequence
  Synthetically generated peptide
  VARIANT (1)..(16): Xaa = Any Amino Acid
ACEYCANPAXCTGXXC

SEQ ID NO: 9208 - protein, 17 aa, Artificial Sequence
  Synthetically generated peptide
  VARIANT (1)..(17): Xaa = Any Amino Acid
ACEYCANPAXCTGXXXC

SEQ ID NO: 9209 - protein, 14 aa, Artificial Sequence
  Synthetically generated peptide
  VARIANT (1)..(14): Xaa = Any Amino Acid
ACEYCANPACXTGC

SEQ ID NO: 9210 - protein, 15 aa, Artificial Sequence
  Synthetically generated peptide
  VARIANT (1)..(15): Xaa = Any Amino Acid
ACEYCANPACXXTGC

SEQ ID NO: 9211 - protein, 16 aa, Artificial Sequence
  Synthetically generated peptide
  VARIANT (1)..(16): Xaa = Any Amino Acid
ACEYCANPACXXXTGC

SEQ ID NO: 9212 - protein, 17 aa, Artificial Sequence
  Synthetically generated peptide
  VARIANT (1)..(17): Xaa = Any Amino Acid
ACEYCANPACXXXXTGC

SEQ ID NO: 9213 - protein, 17 aa, Artificial Sequence
  Synthetically generated peptide
  VARIANT (1)..(17): Xaa = Any Amino Acid
ACEYCANPACXXXTXGC

SEQ ID NO: 9214 - protein, 17 aa, Artificial Sequence
  Synthetically generated peptide
  VARIANT (1)..(17): Xaa = Any Amino Acid
ACEYCANPACXXXTGXC

SEQ ID NO: 9215 - protein, 16 aa, Artificial Sequence
  Synthetically generated peptide
  VARIANT (1)..(16): Xaa = Any Amino Acid
ACEYCANPACXXTXGC

SEQ ID NO: 9216 - protein, 17 aa, Artificial Sequence
  Synthetically generated peptide
  VARIANT (1)..(17): Xaa = Any Amino Acid
ACEYCANPACXXTXXGC

SEQ ID NO: 9217 - protein, 17 aa, Artificial Sequence
  Synthetically generated peptide
  VARIANT (1)..(17): Xaa = Any Amino Acid
ACEYCANPACXXTXGXC

SEQ ID NO: 9218 - protein, 16 aa, Artificial Sequence
  Synthetically generated peptide
  VARIANT (1)..(16): Xaa = Any Amino Acid
ACEYCANPACXXTGXC

SEQ ID NO: 9219 - protein, 17 aa, Artificial Sequence
  Synthetically generated peptide
  VARIANT (1)..(17): Xaa = Any Amino Acid
ACEYCANPACXXTGXXC

SEQ ID NO: 9220 - protein, 15 aa, Artificial Sequence
  Synthetically generated peptide
  VARIANT (1)..(15): Xaa = Any Amino Acid
ACEYCANPACXTXGC

SEQ ID NO: 9221 - protein, 16 aa, Artificial Sequence
  Synthetically generated peptide
  VARIANT (1)..(16): Xaa = Any Amino Acid
ACEYCANPACXTXXGC

SEQ ID NO: 9222 - protein, 17 aa, Artificial Sequence
  Synthetically generated peptide
  VARIANT (1)..(17): Xaa = Any Amino Acid
ACEYCANPACXTXXXGC

SEQ ID NO: 9223 - protein, 17 aa, Artificial Sequence
  Synthetically generated peptide
  VARIANT (1)..(17): Xaa = Any Amino Acid
ACEYCANPACXTXXGXC

SEQ ID NO: 9224 - protein, 16 aa, Artificial Sequence
  Synthetically generated peptide
  VARIANT (1)..(16): Xaa = Any Amino Acid
ACEYCANPACXTXGXC

SEQ ID NO: 9225 - protein, 17 aa, Artificial Sequence
  Synthetically generated peptide
  VARIANT (1)..(17): Xaa = Any Amino Acid
ACEYCANPACXTXGXXC

SEQ ID NO: 9226 - protein, 15 aa, Artificial Sequence
  Synthetically generated peptide
  VARIANT (1)..(15): Xaa = Any Amino Acid
ACEYCANPACXTGXC

SEQ ID NO: 9227 - protein, 16 aa, Artificial Sequence
  Synthetically generated peptide
  VARIANT (1)..(16): Xaa = Any Amino Acid
ACEYCANPACXTGXXC

SEQ ID NO: 9228 - protein, 17 aa, Artificial Sequence
  Synthetically generated peptide
  VARIANT (1)..(17): Xaa = Any Amino Acid
ACEYCANPACXTGXXXC

SEQ ID NO: 9229 - protein, 14 aa, Artificial Sequence
  Synthetically generated peptide
  VARIANT (1)..(14): Xaa = Any Amino Acid
ACEYCANPACTXGC

SEQ ID NO: 9230 - protein, 15 aa, Artificial Sequence
  Synthetically generated peptide
  VARIANT (1)..(15): Xaa = Any Amino Acid
ACEYCANPACTXXGC

SEQ ID NO: 9231 - protein, 16 aa, Artificial Sequence
  Synthetically generated peptide
  VARIANT (1)..(16): Xaa = Any Amino Acid
ACEYCANPACTXXXGC

SEQ ID NO: 9232 - protein, 17 aa, Artificial Sequence
  Synthetically generated peptide
  VARIANT (1)..(17): Xaa = Any Amino Acid
ACEYCANPACTXXXXGC

SEQ ID NO: 9233 - protein, 17 aa, Artificial Sequence
  Synthetically generated peptide
  VARIANT (1)..(17): Xaa = Any Amino Acid
ACEYCANPACTXXXGXC

SEQ ID NO: 9234 - protein, 16 aa, Artificial Sequence
  Synthetically generated peptide
  VARIANT (1)..(16): Xaa = Any Amino Acid
ACEYCANPACTXXGXC

SEQ ID NO: 9235 - protein, 17 aa, Artificial Sequence
  Synthetically generated peptide
  VARIANT (1)..(17): Xaa = Any Amino Acid
ACEYCANPACTXXGXXC

SEQ ID NO: 9236 - protein, 15 aa, Artificial Sequence
  Synthetically generated peptide
  VARIANT (1)..(15): Xaa = Any Amino Acid
ACEYCANPACTXGXC

SEQ ID NO: 9237 - protein, 16 aa, Artificial Sequence
  Synthetically generated peptide
  VARIANT (1)..(16): Xaa = Any Amino Acid
ACEYCANPACTXGXXC

SEQ ID NO: 9238 - protein, 17 aa, Artificial Sequence
  Synthetically generated peptide
  VARIANT (1)..(17): Xaa = Any Amino Acid
ACEYCANPACTXGXXXC

SEQ ID NO: 9239 - protein, 14 aa, Artificial Sequence
  Synthetically generated peptide
  VARIANT (1)..(14): Xaa = Any Amino Acid
ACEYCANPACTGXC

SEQ ID NO: 9240 - protein, 15 aa, Artificial Sequence
  Synthetically generated peptide
  VARIANT (1)..(15): Xaa = Any Amino Acid
ACEYCANPACTGXXC

SEQ ID NO: 9241 - protein, 16 aa, Artificial Sequence
  Synthetically generated peptide
  VARIANT (1)..(16): Xaa = Any Amino Acid
ACEYCANPACTGXXXC

SEQ ID NO: 9242 - protein, 17 aa, Artificial Sequence
  Synthetically generated peptide
  VARIANT (1)..(17): Xaa = Any Amino Acid
ACEYCANPACTGXXXXC

SEQ ID NO: 9243 - protein, 14 aa, Artificial Sequence
  Synthetically generated peptide
  VARIANT (1)..(14): Xaa = Any Amino Acid
CCXEYACNPACTGA

SEQ ID NO: 9244 - protein, 15 aa, Artificial Sequence
  Synthetically generated peptide
  VARIANT (1)..(15): Xaa = Any Amino Acid
CCXXEYACNPACTGA

SEQ ID NO: 9245 - protein, 16 aa, Artificial Sequence
  Synthetically generated peptide
  VARIANT (1)..(16): Xaa = Any Amino Acid
CCXXXEYACNPACTGA

SEQ ID NO: 9246 - protein, 17 aa, Artificial Sequence
  Synthetically generated peptide
  VARIANT (1)..(17): Xaa = Any Amino Acid
CCXXXXEYACNPACTGA

SEQ ID NO: 9247 - protein, 17 aa, Artificial Sequence
  Synthetically generated peptide
  VARIANT (1)..(17): Xaa = Any Amino Acid
CCXXXEXYACNPACTGA

SEQ ID NO: 9248 - protein, 17 aa, Artificial Sequence
  Synthetically generated peptide
  VARIANT (1)..(17): Xaa = Any Amino Acid
CCXXXEYXACNPACTGA

SEQ ID NO: 9249 - protein, 17 aa, Artificial Sequence
  Synthetically generated peptide
  VARIANT (1)..(17): Xaa = Any Amino Acid
CCXXXEYACXNPACTGA

SEQ ID NO: 9250 - protein, 17 aa, Artificial Sequence
  Synthetically generated peptide
  VARIANT (1)..(17): Xaa = Any Amino Acid
CCXXXEYACNXPACTGA

SEQ ID NO: 9251 - protein, 17 aa, Artificial Sequence
  Synthetically generated peptide
  VARIANT (1)..(17): Xaa = Any Amino Acid
CCXXXEYACNPXACTGA

SEQ ID NO: 9252 - protein, 17 aa, Artificial Sequence
  Synthetically generated peptide
  VARIANT (1)..(17): Xaa = Any Amino Acid
CCXXXEYACNPAXCTGA

SEQ ID NO: 9253 - protein, 17 aa, Artificial Sequence
  Synthetically generated peptide
  VARIANT (1)..(17): Xaa = Any Amino Acid
CCXXXEYACNPACXTGA

SEQ ID NO: 9254 - protein, 17 aa, Artificial Sequence
  Synthetically generated peptide
  VARIANT (1)..(17): Xaa = Any Amino Acid
CCXXXEYACNPACTXGA

SEQ ID NO: 9255 - protein, 17 aa, Artificial Sequence
  Synthetically generated peptide
  VARIANT (1)..(17): Xaa = Any Amino Acid
CCXXXEYACNPACTGXA

SEQ ID NO: 9256 - protein, 16 aa, Artificial Sequence
  Synthetically generated peptide
  VARIANT (1)..(16): Xaa = Any Amino Acid
CCXXEXYACNPACTGA

SEQ ID NO: 9257 - protein, 17 aa, Artificial Sequence
  Synthetically generated peptide
  VARIANT (1)..(17): Xaa = Any Amino Acid
CCXXEXXYACNPACTGA

SEQ ID NO: 9258 - protein, 17 aa, Artificial Sequence
  Synthetically generated peptide
  VARIANT (1)..(17): Xaa = Any Amino Acid
CCXXEXYXACNPACTGA

SEQ ID NO: 9259 - protein, 17 aa, Artificial Sequence
  Synthetically generated peptide
  VARIANT (1)..(17): Xaa = Any Amino Acid
CCXXEXYACXNPACTGA

SEQ ID NO: 9260 - protein, 17 aa, Artificial Sequence
  Synthetically generated peptide
  VARIANT (1)..(17): Xaa = Any Amino Acid
CCXXEXYACNXPACTGA

SEQ ID NO: 9261 - protein, 17 aa, Artificial Sequence
  Synthetically generated peptide
  VARIANT (1)..(17): Xaa = Any Amino Acid
CCXXEXYACNPXACTGA

SEQ ID NO: 9262 - protein, 17 aa, Artificial Sequence
  Synthetically generated peptide
  VARIANT (1)..(17): Xaa = Any Amino Acid
CCXXEXYACNPAXCTGA

SEQ ID NO: 9263 - protein, 17 aa, Artificial Sequence
  Synthetically generated peptide
  VARIANT (1)..(17): Xaa = Any Amino Acid
CCXXEXYACNPACXTGA

SEQ ID NO: 9264 - protein, 17 aa, Artificial Sequence
  Synthetically generated peptide
  VARIANT (1)..(17): Xaa = Any Amino Acid
CCXXEXYACNPACTXGA

SEQ ID NO: 9265 - protein, 17 aa, Artificial Sequence
  Synthetically generated peptide
  VARIANT (1)..(17): Xaa = Any Amino Acid
CCXXEXYACNPACTGXA

SEQ ID NO: 9266 - protein, 16 aa, Artificial Sequence
  Synthetically generated peptide
  VARIANT (1)..(16): Xaa = Any Amino Acid
CCXXEYXACNPACTGA

SEQ ID NO: 9267 - protein, 17 aa, Artificial Sequence
  Synthetically generated peptide
  VARIANT (1)..(17): Xaa = Any Amino Acid
CCXXEYXXACNPACTGA

SEQ ID NO: 9268 - protein, 17 aa, Artificial Sequence
  Synthetically generated peptide
  VARIANT (1)..(17): Xaa = Any Amino Acid
CCXXEYXACXNPACTGA

SEQ ID NO: 9269 - protein, 17 aa, Artificial Sequence
  Synthetically generated peptide
  VARIANT (1)..(17): Xaa = Any Amino Acid
CCXXEYXACNXPACTGA

SEQ ID NO: 9270 - protein, 17 aa, Artificial Sequence
  Synthetically generated peptide
  VARIANT (1)..(17): Xaa = Any Amino Acid
CCXXEYXACNPXACTGA

SEQ ID NO: 9271 - protein, 17 aa, Artificial Sequence
  Synthetically generated peptide
  VARIANT (1)..(17): Xaa = Any Amino Acid
CCXXEYXACNPAXCTGA

SEQ ID NO: 9272 - protein, 17 aa, Artificial Sequence
  Synthetically generated peptide
  VARIANT (1)..(17): Xaa = Any Amino Acid
CCXXEYXACNPACXTGA

SEQ ID NO: 9273 - protein, 17 aa, Artificial Sequence
  Synthetically generated peptide
  VARIANT (1)..(17): Xaa = Any Amino Acid
CCXXEYXACNPACTXGA

SEQ ID NO: 9274 - protein, 17 aa, Artificial Sequence
  Synthetically generated peptide
  VARIANT (1)..(17): Xaa = Any Amino Acid
CCXXEYXACNPACTGXA

SEQ ID NO: 9275 - protein, 16 aa, Artificial Sequence
  Synthetically generated peptide
  VARIANT (1)..(16): Xaa = Any Amino Acid
CCXXEYACXNPACTGA

SEQ ID NO: 9276 - protein, 17 aa, Artificial Sequence
  Synthetically generated peptide
  VARIANT (1)..(17): Xaa = Any Amino Acid
CCXXEYACXXNPACTGA

SEQ ID NO: 9277 - protein, 17 aa, Artificial Sequence
  Synthetically generated peptide
  VARIANT (1)..(17): Xaa = Any Amino Acid
CCXXEYACXNXPACTGA

SEQ ID NO: 9278 - protein, 17 aa, Artificial Sequence
  Synthetically generated peptide
  VARIANT (1)..(17): Xaa = Any Amino Acid
CCXXEYACXNPXACTGA

SEQ ID NO: 9279 - protein, 17 aa, Artificial Sequence
  Synthetically generated peptide
  VARIANT (1)..(17): Xaa = Any Amino Acid
CCXXEYACXNPAXCTGA

SEQ ID NO: 9280 - protein, 17 aa, Artificial Sequence
  Synthetically generated peptide
  VARIANT (1)..(17): Xaa = Any Amino Acid
CCXXEYACXNPACXTGA

SEQ ID NO: 9281 - protein, 17 aa, Artificial Sequence
  Synthetically generated peptide
  VARIANT (1)..(17): Xaa = Any Amino Acid
CCXXEYACXNPACTXGA

SEQ ID NO: 9282 - protein, 17 aa, Artificial Sequence
  Synthetically generated peptide
  VARIANT (1)..(17): Xaa = Any Amino Acid
CCXXEYACXNPACTGXA

SEQ ID NO: 9283 - protein, 16 aa, Artificial Sequence
  Synthetically generated peptide
  VARIANT (1)..(16): Xaa = Any Amino Acid
CCXXEYACNXPACTGA

SEQ ID NO: 9284 - protein, 17 aa, Artificial Sequence
  Synthetically generated peptide
  VARIANT (1)..(17): Xaa = Any Amino Acid
CCXXEYACNXXPACTGA

SEQ ID NO: 9285 - protein, 17 aa, Artificial Sequence
  Synthetically generated peptide
  VARIANT (1)..(17): Xaa = Any Amino Acid
CCXXEYACNXPXACTGA

SEQ ID NO: 9286 - protein, 17 aa, Artificial Sequence
  Synthetically generated peptide
  VARIANT (1)..(17): Xaa = Any Amino Acid
CCXXEYACNXPAXCTGA

SEQ ID NO: 9287 - protein, 17 aa, Artificial Sequence
  Synthetically generated peptide
  VARIANT (1)..(17): Xaa = Any Amino Acid
CCXXEYACNXPACXTGA

SEQ ID NO: 9288 - protein, 17 aa, Artificial Sequence
  Synthetically generated peptide
  VARIANT (1)..(17): Xaa = Any Amino Acid
CCXXEYACNXPACTXGA

SEQ ID NO: 9289 - protein, 17 aa, Artificial Sequence
  Synthetically generated peptide
  VARIANT (1)..(17): Xaa = Any Amino Acid
CCXXEYACNXPACTGXA

SEQ ID NO: 9290 - protein, 16 aa, Artificial Sequence
  Synthetically generated peptide
  VARIANT (1)..(16): Xaa = Any Amino Acid
CCXXEYACNPXACTGA

SEQ ID NO: 9291 - protein, 17 aa, Artificial Sequence
  Synthetically generated peptide
  VARIANT (1)..(17): Xaa = Any Amino Acid
CCXXEYACNPXXACTGA

SEQ ID NO: 9292 - protein, 17 aa, Artificial Sequence
  Synthetically generated peptide
  VARIANT (1)..(17): Xaa = Any Amino Acid
CCXXEYACNPXAXCTGA

SEQ ID NO: 9293 - protein, 17 aa, Artificial Sequence
  Synthetically generated peptide
  VARIANT (1)..(17): Xaa = Any Amino Acid
CCXXEYACNPXACXTGA

SEQ ID NO: 9294 - protein, 17 aa, Artificial Sequence
  Synthetically generated peptide
  VARIANT (1)..(17): Xaa = Any Amino Acid
CCXXEYACNPXACTXGA

SEQ ID NO: 9295 - protein, 17 aa, Artificial Sequence
  Synthetically generated peptide
  VARIANT (1)..(17): Xaa = Any Amino Acid
CCXXEYACNPXACTGXA

SEQ ID NO: 9296 - protein, 16 aa, Artificial Sequence
  Synthetically generated peptide
  VARIANT (1)..(16): Xaa = Any Amino Acid
CCXXEYACNPAXCTGA

SEQ ID NO: 9297 - protein, 17 aa, Artificial Sequence
  Synthetically generated peptide
  VARIANT (1)..(17): Xaa = Any Amino Acid
CCXXEYACNPAXXCTGA

SEQ ID NO: 9298 - protein, 17 aa, Artificial Sequence
  Synthetically generated peptide
  VARIANT (1)..(17): Xaa = Any Amino Acid
CCXXEYACNPAXCXTGA

SEQ ID NO: 9299 - protein, 17 aa, Artificial Sequence
  Synthetically generated peptide
  VARIANT (1)..(17): Xaa = Any Amino Acid
CCXXEYACNPAXCTXGA

SEQ ID NO: 9300 - protein, 17 aa, Artificial Sequence
  Synthetically generated peptide
  VARIANT (1)..(17): Xaa = Any Amino Acid
CCXXEYACNPAXCTGXA

SEQ ID NO: 9301 - protein, 16 aa, Artificial Sequence
  Synthetically generated peptide
  VARIANT (1)..(16): Xaa = Any Amino Acid
CCXXEYACNPACXTGA

SEQ ID NO: 9302 - protein, 17 aa, Artificial Sequence
  Synthetically generated peptide
  VARIANT (1)..(17): Xaa = Any Amino Acid
CCXXEYACNPACXXTGA

SEQ ID NO: 9303 - protein, 17 aa, Artificial Sequence
  Synthetically generated peptide
  VARIANT (1)..(17): Xaa = Any Amino Acid
CCXXEYACNPACXTXGA

SEQ ID NO: 9304 - protein, 17 aa, Artificial Sequence
  Synthetically generated peptide
  VARIANT (1)..(17): Xaa = Any Amino Acid
CCXXEYACNPACXTGXA

SEQ ID NO: 9305 - protein, 16 aa, Artificial Sequence
  Synthetically generated peptide
  VARIANT (1)..(16): Xaa = Any Amino Acid
CCXXEYACNPACTXGA

SEQ ID NO: 9306 - protein, 17 aa, Artificial Sequence
  Synthetically generated peptide
  VARIANT (1)..(17): Xaa = Any Amino Acid
CCXXEYACNPACTXXGA

SEQ ID NO: 9307 - protein, 17 aa, Artificial Sequence
  Synthetically generated peptide
  VARIANT (1)..(17): Xaa = Any Amino Acid
CCXXEYACNPACTXGXA

SEQ ID NO: 9308 - protein, 16 aa, Artificial Sequence
  Synthetically generated peptide
  VARIANT (1)..(16): Xaa = Any Amino Acid
CCXXEYACNPACTGXA

SEQ ID NO: 9309 - protein, 17 aa, Artificial Sequence
  Synthetically generated peptide
  VARIANT (1)..(17): Xaa = Any Amino Acid
CCXXEYACNPACTGXXA

SEQ ID NO: 9310 - protein, 15 aa, Artificial Sequence
  Synthetically generated peptide
  VARIANT (1)..(15): Xaa = Any Amino Acid
CCXEXYACNPACTGA

SEQ ID NO: 9311 - protein, 16 aa, Artificial Sequence
  Synthetically generated peptide
  VARIANT (1)..(16): Xaa = Any Amino Acid
CCXEXXYACNPACTGA

SEQ ID NO: 9312 - protein, 17 aa, Artificial Sequence
  Synthetically generated peptide
  VARIANT (1)..(17): Xaa = Any Amino Acid
CCXEXXXYACNPACTGA

SEQ ID NO: 9313 - protein, 17 aa, Artificial Sequence
  Synthetically generated peptide
  VARIANT (1)..(17): Xaa = Any Amino Acid
CCXEXXYXACNPACTGA

SEQ ID NO: 9314 - protein, 17 aa, Artificial Sequence
  Synthetically generated peptide
  VARIANT (1)..(17): Xaa = Any Amino Acid
CCXEXXYACXNPACTGA

SEQ ID NO: 9315 - protein, 17 aa, Artificial Sequence
  Synthetically generated peptide
  VARIANT (1)..(17): Xaa = Any Amino Acid
CCXEXXYACNXPACTGA

SEQ ID NO: 9316 - protein, 17 aa, Artificial Sequence
  Synthetically generated peptide
  VARIANT (1)..(17): Xaa = Any Amino Acid
CCXEXXYACNPXACTGA

SEQ ID NO: 9317 - protein, 17 aa, Artificial Sequence
  Synthetically generated peptide
  VARIANT (1)..(17): Xaa = Any Amino Acid
CCXEXXYACNPAXCTGA

SEQ ID NO: 9318 - protein, 17 aa, Artificial Sequence
  Synthetically generated peptide
  VARIANT (1)..(17): Xaa = Any Amino Acid
CCXEXXYACNPACXTGA

SEQ ID NO: 9319 - protein, 17 aa, Artificial Sequence
  Synthetically generated peptide
  VARIANT (1)..(17): Xaa = Any Amino Acid
CCXEXXYACNPACTXGA

SEQ ID NO: 9320 - protein, 17 aa, Artificial Sequence
  Synthetically generated peptide
  VARIANT (1)..(17): Xaa = Any Amino Acid
CCXEXXYACNPACTGXA

SEQ ID NO: 9321 - protein, 16 aa, Artificial Sequence
  Synthetically generated peptide
  VARIANT (1)..(16): Xaa = Any Amino Acid
CCXEXYXACNPACTGA

SEQ ID NO: 9322 - protein, 17 aa, Artificial Sequence
  Synthetically generated peptide
  VARIANT (1)..(17): Xaa = Any Amino Acid
CCXEXYXXACNPACTGA

SEQ ID NO: 9323 - protein, 17 aa, Artificial Sequence
  Synthetically generated peptide
  VARIANT (1)..(17): Xaa = Any Amino Acid
CCXEXYXACXNPACTGA

SEQ ID NO: 9324 - protein, 17 aa, Artificial Sequence
  Synthetically generated peptide
  VARIANT (1)..(17): Xaa = Any Amino Acid
CCXEXYXACNXPACTGA

SEQ ID NO: 9325 - protein, 17 aa, Artificial Sequence
  Synthetically generated peptide
  VARIANT (1)..(17): Xaa = Any Amino Acid
CCXEXYXACNPXACTGA

SEQ ID NO: 9326 - protein, 17 aa, Artificial Sequence
  Synthetically generated peptide
  VARIANT (1)..(17): Xaa = Any Amino Acid
CCXEXYXACNPAXCTGA

SEQ ID NO: 9327 - protein, 17 aa, Artificial Sequence
  Synthetically generated peptide
  VARIANT (1)..(17): Xaa = Any Amino Acid
CCXEXYXACNPACXTGA

SEQ ID NO: 9328 - protein, 17 aa, Artificial Sequence
  Synthetically generated peptide
  VARIANT (1)..(17): Xaa = Any Amino Acid
CCXEXYXACNPACTXGA

SEQ ID NO: 9329 - protein, 17 aa, Artificial Sequence
  Synthetically generated peptide
  VARIANT (1)..(17): Xaa = Any Amino Acid
CCXEXYXACNPACTGXA

SEQ ID NO: 9330 - protein, 16 aa, Artificial Sequence
  Synthetically generated peptide
  VARIANT (1)..(16): Xaa = Any Amino Acid
CCXEXYACXNPACTGA

SEQ ID NO: 9331 - protein, 17 aa, Artificial Sequence
  Synthetically generated peptide
  VARIANT (1)..(17): Xaa = Any Amino Acid
CCXEXYACXXNPACTGA

SEQ ID NO: 9332 - protein, 17 aa, Artificial Sequence
  Synthetically generated peptide
  VARIANT (1)..(17): Xaa = Any Amino Acid
CCXEXYACXNXPACTGA

SEQ ID NO: 9333 - protein, 17 aa, Artificial Sequence
  Synthetically generated peptide
  VARIANT (1)..(17): Xaa = Any Amino Acid
CCXEXYACXNPXACTGA

SEQ ID NO: 9334 - protein, 17 aa, Artificial Sequence
  Synthetically generated peptide
  VARIANT (1)..(17): Xaa = Any Amino Acid
CCXEXYACXNPAXCTGA

SEQ ID NO: 9335 - protein, 17 aa, Artificial Sequence
  Synthetically generated peptide
  VARIANT (1)..(17): Xaa = Any Amino Acid
CCXEXYACXNPACXTGA

SEQ ID NO: 9336 - protein, 17 aa, Artificial Sequence
  Synthetically generated peptide
  VARIANT (1)..(17): Xaa = Any Amino Acid
CCXEXYACXNPACTXGA

SEQ ID NO: 9337 - protein, 17 aa, Artificial Sequence
  Synthetically generated peptide
  VARIANT (1)..(17): Xaa = Any Amino Acid
CCXEXYACXNPACTGXA

SEQ ID NO: 9338 - protein, 16 aa, Artificial Sequence
  Synthetically generated peptide
  VARIANT (1)..(16): Xaa = Any Amino Acid
CCXEXYACNXPACTGA

SEQ ID NO: 9339 - protein, 17 aa, Artificial Sequence
  Synthetically generated peptide
  VARIANT (1)..(17): Xaa = Any Amino Acid
CCXEXYACNXXPACTGA

SEQ ID NO: 9340 - protein, 17 aa, Artificial Sequence
  Synthetically generated peptide
  VARIANT (1)..(17): Xaa = Any Amino Acid
CCXEXYACNXPXACTGA

SEQ ID NO: 9341 - protein, 17 aa, Artificial Sequence
  Synthetically generated peptide
  VARIANT (1)..(17): Xaa = Any Amino Acid
CCXEXYACNXPAXCTGA

SEQ ID NO: 9342 - protein, 17 aa, Artificial Sequence
  Synthetically generated peptide
  VARIANT (1)..(17): Xaa = Any Amino Acid
CCXEXYACNXPACXTGA

SEQ ID NO: 9343 - protein, 17 aa, Artificial Sequence
  Synthetically generated peptide
  VARIANT (1)..(17): Xaa = Any Amino Acid
CCXEXYACNXPACTXGA

SEQ ID NO: 9344 - protein, 17 aa, Artificial Sequence
  Synthetically generated peptide
  VARIANT (1)..(17): Xaa = Any Amino Acid
CCXEXYACNXPACTGXA

SEQ ID NO: 9345 - protein, 16 aa, Artificial Sequence
  Synthetically generated peptide
  VARIANT (1)..(16): Xaa = Any Amino Acid
CCXEXYACNPXACTGA

SEQ ID NO: 9346 - protein, 17 aa, Artificial Sequence
  Synthetically generated peptide
  VARIANT (1)..(17): Xaa = Any Amino Acid
CCXEXYACNPXXACTGA

SEQ ID NO: 9347 - protein, 17 aa, Artificial Sequence
  Synthetically generated peptide
  VARIANT (1)..(17): Xaa = Any Amino Acid
CCXEXYACNPXAXCTGA

SEQ ID NO: 9348 - protein, 17 aa, Artificial Sequence
  Synthetically generated peptide
  VARIANT (1)..(17): Xaa = Any Amino Acid
CCXEXYACNPXACXTGA

SEQ ID NO: 9349 - protein, 17 aa, Artificial Sequence
  Synthetically generated peptide
  VARIANT (1)..(17): Xaa = Any Amino Acid
CCXEXYACNPXACTXGA

SEQ ID NO: 9350 - protein, 17 aa, Artificial Sequence
  Synthetically generated peptide
  VARIANT (1)..(17): Xaa = Any Amino Acid
CCXEXYACNPXACTGXA

SEQ ID NO: 9351 - protein, 16 aa, Artificial Sequence
  Synthetically generated peptide
  VARIANT (1)..(16): Xaa = Any Amino Acid
CCXEXYACNPAXCTGA

SEQ ID NO: 9352 - protein, 17 aa, Artificial Sequence
  Synthetically generated peptide
  VARIANT (1)..(17): Xaa = Any Amino Acid
CCXEXYACNPAXXCTGA

SEQ ID NO: 9353 - protein, 17 aa, Artificial Sequence
  Synthetically generated peptide
  VARIANT (1)..(17): Xaa = Any Amino Acid
CCXEXYACNPAXCXTGA

SEQ ID NO: 9354 - protein, 17 aa, Artificial Sequence
  Synthetically generated peptide
  VARIANT (1)..(17): Xaa = Any Amino Acid
CCXEXYACNPAXCTXGA

SEQ ID NO: 9355 - protein, 17 aa, Artificial Sequence
  Synthetically generated peptide
  VARIANT (1)..(17): Xaa = Any Amino Acid
CCXEXYACNPAXCTGXA

SEQ ID NO: 9356 - protein, 16 aa, Artificial Sequence
  Synthetically generated peptide
  VARIANT (1)..(16): Xaa = Any Amino Acid
CCXEXYACNPACXTGA

SEQ ID NO: 9357 - protein, 17 aa, Artificial Sequence
  Synthetically generated peptide
  VARIANT (1)..(17): Xaa = Any Amino Acid
CCXEXYACNPACXXTGA

SEQ ID NO: 9358 - protein, 17 aa, Artificial Sequence
  Synthetically generated peptide
  VARIANT (1)..(17): Xaa = Any Amino Acid
CCXEXYACNPACXTXGA

SEQ ID NO: 9359 - protein, 17 aa, Artificial Sequence
  Synthetically generated peptide
  VARIANT (1)..(17): Xaa = Any Amino Acid
CCXEXYACNPACXTGXA

SEQ ID NO: 9360 - protein, 16 aa, Artificial Sequence
  Synthetically generated peptide
  VARIANT (1)..(16): Xaa = Any Amino Acid
CCXEXYACNPACTXGA

SEQ ID NO: 9361 - protein, 17 aa, Artificial Sequence
  Synthetically generated peptide
  VARIANT (1)..(17): Xaa = Any Amino Acid
CCXEXYACNPACTXXGA

SEQ ID NO: 9362 - protein, 17 aa, Artificial Sequence
  Synthetically generated peptide
  VARIANT (1)..(17): Xaa = Any Amino Acid
CCXEXYACNPACTXGXA

SEQ ID NO: 9363 - protein, 16 aa, Artificial Sequence
  Synthetically generated peptide
  VARIANT (1)..(16): Xaa = Any Amino Acid
CCXEXYACNPACTGXA

SEQ ID NO: 9364 - protein, 17 aa, Artificial Sequence
  Synthetically generated peptide
  VARIANT (1)..(17): Xaa = Any Amino Acid
CCXEXYACNPACTGXXA

SEQ ID NO: 9365 - protein, 15 aa, Artificial Sequence
  Synthetically generated peptide
  VARIANT (1)..(15): Xaa = Any Amino Acid
CCXEYXACNPACTGA

SEQ ID NO: 9366 - protein, 16 aa, Artificial Sequence
  Synthetically generated peptide
  VARIANT (1)..(16): Xaa = Any Amino Acid
CCXEYXXACNPACTGA

SEQ ID NO: 9367 - protein, 17 aa, Artificial Sequence
  Synthetically generated peptide
  VARIANT (1)..(17): Xaa = Any Amino Acid
CCXEYXXXACNPACTGA

SEQ ID NO: 9368 - protein, 17 aa, Artificial Sequence
  Synthetically generated peptide
  VARIANT (1)..(17): Xaa = Any Amino Acid
CCXEYXXACXNPACTGA

SEQ ID NO: 9369 - protein, 17 aa, Artificial Sequence
  Synthetically generated peptide
  VARIANT (1)..(17): Xaa = Any Amino Acid
CCXEYXXACNXPACTGA

SEQ ID NO: 9370 - protein, 17 aa, Artificial Sequence
  Synthetically generated peptide
  VARIANT (1)..(17): Xaa = Any Amino Acid
CCXEYXXACNPXACTGA

SEQ ID NO: 9371 - protein, 17 aa, Artificial Sequence
  Synthetically generated peptide
  VARIANT (1)..(17): Xaa = Any Amino Acid
CCXEYXXACNPAXCTGA

SEQ ID NO: 9372 - protein, 17 aa, Artificial Sequence
  Synthetically generated peptide
  VARIANT (1)..(17): Xaa = Any Amino Acid
CCXEYXXACNPACXTGA

SEQ ID NO: 9373 - protein, 17 aa, Artificial Sequence
  Synthetically generated peptide
  VARIANT (1)..(17): Xaa = Any Amino Acid
CCXEYXXACNPACTXGA

SEQ ID NO: 9374 - protein, 17 aa, Artificial Sequence
  Synthetically generated peptide
  VARIANT (1)..(17): Xaa = Any Amino Acid
CCXEYXXACNPACTGXA

SEQ ID NO: 9375 - protein, 16 aa, Artificial Sequence
  Synthetically generated peptide
  VARIANT (1)..(16): Xaa = Any Amino Acid
CCXEYXACXNPACTGA

SEQ ID NO: 9376 - protein, 17 aa, Artificial Sequence
  Synthetically generated peptide
  VARIANT (1)..(17): Xaa = Any Amino Acid
CCXEYXACXXNPACTGA

SEQ ID NO: 9377 - protein, 17 aa, Artificial Sequence
  Synthetically generated peptide
  VARIANT (1)..(17): Xaa = Any Amino Acid
CCXEYXACXNXPACTGA

SEQ ID NO: 9378 - protein, 17 aa, Artificial Sequence
  Synthetically generated peptide
  VARIANT (1)..(17): Xaa = Any Amino Acid
CCXEYXACXNPXACTGA

SEQ ID NO: 9379 - protein, 17 aa, Artificial Sequence
  Synthetically generated peptide
  VARIANT (1)..(17): Xaa = Any Amino Acid
CCXEYXACXNPAXCTGA

SEQ ID NO: 9380 - protein, 17 aa, Artificial Sequence
  Synthetically generated peptide
  VARIANT (1)..(17): Xaa = Any Amino Acid
CCXEYXACXNPACXTGA

SEQ ID NO: 9381 - protein, 17 aa, Artificial Sequence
  Synthetically generated peptide
  VARIANT (1)..(17): Xaa = Any Amino Acid
CCXEYXACXNPACTXGA

SEQ ID NO: 9382 - protein, 17 aa, Artificial Sequence
  Synthetically generated peptide
  VARIANT (1)..(17): Xaa = Any Amino Acid
CCXEYXACXNPACTGXA

SEQ ID NO: 9383 - protein, 16 aa, Artificial Sequence
  Synthetically generated peptide
  VARIANT (1)..(16): Xaa = Any Amino Acid
CCXEYXACNXPACTGA

SEQ ID NO: 9384 - protein, 17 aa, Artificial Sequence
  Synthetically generated peptide
  VARIANT (1)..(17): Xaa = Any Amino Acid
CCXEYXACNXXPACTGA

SEQ ID NO: 9385 - protein, 17 aa, Artificial Sequence
  Synthetically generated peptide
  VARIANT (1)..(17): Xaa = Any Amino Acid
CCXEYXACNXPXACTGA

SEQ ID NO: 9386 - protein, 17 aa, Artificial Sequence
  Synthetically generated peptide
  VARIANT (1)..(17): Xaa = Any Amino Acid
CCXEYXACNXPAXCTGA

SEQ ID NO: 9387 - protein, 17 aa, Artificial Sequence
  Synthetically generated peptide
  VARIANT (1)..(17): Xaa = Any Amino Acid
CCXEYXACNXPACXTGA

SEQ ID NO: 9388 - protein, 17 aa, Artificial Sequence
  Synthetically generated peptide
  VARIANT (1)..(17): Xaa = Any Amino Acid
CCXEYXACNXPACTXGA

SEQ ID NO: 9389 - protein, 17 aa, Artificial Sequence
  Synthetically generated peptide
  VARIANT (1)..(17): Xaa = Any Amino Acid
CCXEYXACNXPACTGXA

SEQ ID NO: 9390 - protein, 16 aa, Artificial Sequence
  Synthetically generated peptide
  VARIANT (1)..(16): Xaa = Any Amino Acid
CCXEYXACNPXACTGA

SEQ ID NO: 9391 - protein, 17 aa, Artificial Sequence
  Synthetically generated peptide
  VARIANT (1)..(17): Xaa = Any Amino Acid
CCXEYXACNPXXACTGA

SEQ ID NO: 9392 - protein, 17 aa, Artificial Sequence
  Synthetically generated peptide
  VARIANT (1)..(17): Xaa = Any Amino Acid
CCXEYXACNPXAXCTGA

SEQ ID NO: 9393 - protein, 17 aa, Artificial Sequence
  Synthetically generated peptide
  VARIANT (1)..(17): Xaa = Any Amino Acid
CCXEYXACNPXACXTGA

SEQ ID NO: 9394 - protein, 17 aa, Artificial Sequence
  Synthetically generated peptide
  VARIANT (1)..(17): Xaa = Any Amino Acid
CCXEYXACNPXACTXGA

SEQ ID NO: 9395 - protein, 17 aa, Artificial Sequence
  Synthetically generated peptide
  VARIANT (1)..(17): Xaa = Any Amino Acid
CCXEYXACNPXACTGXA

SEQ ID NO: 9396 - protein, 16 aa, Artificial Sequence
  Synthetically generated peptide
  VARIANT (1)..(16): Xaa = Any Amino Acid
CCXEYXACNPAXCTGA

SEQ ID NO: 9397 - protein, 17 aa, Artificial Sequence
  Synthetically generated peptide
  VARIANT (1)..(17): Xaa = Any Amino Acid
CCXEYXACNPAXXCTGA

SEQ ID NO: 9398 - protein, 17 aa, Artificial Sequence
  Synthetically generated peptide
  VARIANT (1)..(17): Xaa = Any Amino Acid
CCXEYXACNPAXCXTGA

SEQ ID NO: 9399 - protein, 17 aa, Artificial Sequence
  Synthetically generated peptide
  VARIANT (1)..(17): Xaa = Any Amino Acid
CCXEYXACNPAXCTXGA

SEQ ID NO: 9400 - protein, 17 aa, Artificial Sequence
  Synthetically generated peptide
  VARIANT (1)..(17): Xaa = Any Amino Acid
CCXEYXACNPAXCTGXA

SEQ ID NO: 9401 - protein, 16 aa, Artificial Sequence
  Synthetically generated peptide
  VARIANT (1)..(16): Xaa = Any Amino Acid
CCXEYXACNPACXTGA

SEQ ID NO: 9402 - protein, 17 aa, Artificial Sequence
  Synthetically generated peptide
  VARIANT (1)..(17): Xaa = Any Amino Acid
CCXEYXACNPACXXTGA

SEQ ID NO: 9403 - protein, 17 aa, Artificial Sequence
  Synthetically generated peptide
  VARIANT (1)..(17): Xaa = Any Amino Acid
CCXEYXACNPACXTXGA

SEQ ID NO: 9404 - protein, 17 aa, Artificial Sequence
  Synthetically generated peptide
  VARIANT (1)..(17): Xaa = Any Amino Acid
CCXEYXACNPACXTGXA

SEQ ID NO: 9405 - protein, 16 aa, Artificial Sequence
  Synthetically generated peptide
  VARIANT (1)..(16): Xaa = Any Amino Acid
CCXEYXACNPACTXGA

SEQ ID NO: 9406 - protein, 17 aa, Artificial Sequence
  Synthetically generated peptide
  VARIANT (1)..(17): Xaa = Any Amino Acid
CCXEYXACNPACTXXGA

SEQ ID NO: 9407 - protein, 17 aa, Artificial Sequence
  Synthetically generated peptide
  VARIANT (1)..(17): Xaa = Any Amino Acid
CCXEYXACNPACTXGXA

SEQ ID NO: 9408 - protein, 16 aa, Artificial Sequence
  Synthetically generated peptide
  VARIANT (1)..(16): Xaa = Any Amino Acid
CCXEYXACNPACTGXA

SEQ ID NO: 9409 - protein, 17 aa, Artificial Sequence
  Synthetically generated peptide
  VARIANT (1)..(17): Xaa = Any Amino Acid
CCXEYXACNPACTGXXA

SEQ ID NO: 9410 - protein, 15 aa, Artificial Sequence
  Synthetically generated peptide
  VARIANT (1)..(15): Xaa = Any Amino Acid
CCXEYACXNPACTGA

SEQ ID NO: 9411 - protein, 16 aa, Artificial Sequence
  Synthetically generated peptide
  VARIANT (1)..(16): Xaa = Any Amino Acid
CCXEYACXXNPACTGA

SEQ ID NO: 9412 - protein, 17 aa, Artificial Sequence
  Synthetically generated peptide
  VARIANT (1)..(17): Xaa = Any Amino Acid
CCXEYACXXXNPACTGA

SEQ ID NO: 9413 - protein, 17 aa, Artificial Sequence
  Synthetically generated peptide
  VARIANT (1)..(17): Xaa = Any Amino Acid
CCXEYACXXNXPACTGA

SEQ ID NO: 9414 - protein, 17 aa, Artificial Sequence
  Synthetically generated peptide
  VARIANT (1)..(17): Xaa = Any Amino Acid
CCXEYACXXNPXACTGA

SEQ ID NO: 9415 - protein, 17 aa, Artificial Sequence
  Synthetically generated peptide
  VARIANT (1)..(17): Xaa = Any Amino Acid
CCXEYACXXNPAXCTGA

SEQ ID NO: 9416 - protein, 17 aa, Artificial Sequence
  Synthetically generated peptide
  VARIANT (1)..(17): Xaa = Any Amino Acid
CCXEYACXXNPACXTGA

SEQ ID NO: 9417 - protein, 17 aa, Artificial Sequence
  Synthetically generated peptide
  VARIANT (1)..(17): Xaa = Any Amino Acid
CCXEYACXXNPACTXGA

SEQ ID NO: 9418 - protein, 17 aa, Artificial Sequence
  Synthetically generated peptide
  VARIANT (1)..(17): Xaa = Any Amino Acid
CCXEYACXXNPACTGXA

SEQ ID NO: 9419 - protein, 16 aa, Artificial Sequence
  Synthetically generated peptide
  VARIANT (1)..(16): Xaa = Any Amino Acid
CCXEYACXNXPACTGA

SEQ ID NO: 9420 - protein, 17 aa, Artificial Sequence
  Synthetically generated peptide
  VARIANT (1)..(17): Xaa = Any Amino Acid
CCXEYACXNXXPACTGA

SEQ ID NO: 9421 - protein, 17 aa, Artificial Sequence
  Synthetically generated peptide
  VARIANT (1)..(17): Xaa = Any Amino Acid
CCXEYACXNXPXACTGA

SEQ ID NO: 9422 - protein, 17 aa, Artificial Sequence
  Synthetically generated peptide
  VARIANT (1)..(17): Xaa = Any Amino Acid
CCXEYACXNXPAXCTGA

SEQ ID NO: 9423 - protein, 17 aa, Artificial Sequence
  Synthetically generated peptide
  VARIANT (1)..(17): Xaa = Any Amino Acid
CCXEYACXNXPACXTGA

SEQ ID NO: 9424 - protein, 17 aa, Artificial Sequence
  Synthetically generated peptide
  VARIANT (1)..(17): Xaa = Any Amino Acid
CCXEYACXNXPACTXGA

SEQ ID NO: 9425 - protein, 17 aa, Artificial Sequence
  Synthetically generated peptide
  VARIANT (1)..(17): Xaa = Any Amino Acid
CCXEYACXNXPACTGXA

SEQ ID NO: 9426 - protein, 16 aa, Artificial Sequence
  Synthetically generated peptide
  VARIANT (1)..(16): Xaa = Any Amino Acid
CCXEYACXNPXACTGA

SEQ ID NO: 9427 - protein, 17 aa, Artificial Sequence
  Synthetically generated peptide
  VARIANT (1)..(17): Xaa = Any Amino Acid
CCXEYACXNPXXACTGA

SEQ ID NO: 9428 - protein, 17 aa, Artificial Sequence
  Synthetically generated peptide
  VARIANT (1)..(17): Xaa = Any Amino Acid
CCXEYACXNPXAXCTGA

SEQ ID NO: 9429 - protein, 17 aa, Artificial Sequence
  Synthetically generated peptide
  VARIANT (1)..(17): Xaa = Any Amino Acid
CCXEYACXNPXACXTGA

SEQ ID NO: 9430 - protein, 17 aa, Artificial Sequence
  Synthetically generated peptide
  VARIANT (1)..(17): Xaa = Any Amino Acid
CCXEYACXNPXACTXGA

SEQ ID NO: 9431 - protein, 17 aa, Artificial Sequence
  Synthetically generated peptide
  VARIANT (1)..(17): Xaa = Any Amino Acid
CCXEYACXNPXACTGXA

SEQ ID NO: 9432 - protein, 16 aa, Artificial Sequence
  Synthetically generated peptide
  VARIANT (1)..(16): Xaa = Any Amino Acid
CCXEYACXNPAXCTGA

SEQ ID NO: 9433 - protein, 17 aa, Artificial Sequence
  Synthetically generated peptide
  VARIANT (1)..(17): Xaa = Any Amino Acid
CCXEYACXNPAXXCTGA

SEQ ID NO: 9434 - protein, 17 aa, Artificial Sequence
  Synthetically generated peptide
  VARIANT (1)..(17): Xaa = Any Amino Acid
CCXEYACXNPAXCXTGA

SEQ ID NO: 9435 - protein, 17 aa, Artificial Sequence
  Synthetically generated peptide
  VARIANT (1)..(17): Xaa = Any Amino Acid
CCXEYACXNPAXCTXGA

SEQ ID NO: 9436 - protein, 17 aa, Artificial Sequence
  Synthetically generated peptide
  VARIANT (1)..(17): Xaa = Any Amino Acid
CCXEYACXNPAXCTGXA

SEQ ID NO: 9437 - protein, 16 aa, Artificial Sequence
  Synthetically generated peptide
  VARIANT (1)..(16): Xaa = Any Amino Acid
CCXEYACXNPACXTGA

SEQ ID NO: 9438 - protein, 17 aa, Artificial Sequence
  Synthetically generated peptide
  VARIANT (1)..(17): Xaa = Any Amino Acid
CCXEYACXNPACXXTGA

SEQ ID NO: 9439 - protein, 17 aa, Artificial Sequence
  Synthetically generated peptide
  VARIANT (1)..(17): Xaa = Any Amino Acid
CCXEYACXNPACXTXGA

SEQ ID NO: 9440 - protein, 17 aa, Artificial Sequence
  Synthetically generated peptide
  VARIANT (1)..(17): Xaa = Any Amino Acid
CCXEYACXNPACXTGXA

SEQ ID NO: 9441 - protein, 16 aa, Artificial Sequence
  Synthetically generated peptide
  VARIANT (1)..(16): Xaa = Any Amino Acid
CCXEYACXNPACTXGA

SEQ ID NO: 9442 - protein, 17 aa, Artificial Sequence
  Synthetically generated peptide
  VARIANT (1)..(17): Xaa = Any Amino Acid
CCXEYACXNPACTXXGA

SEQ ID NO: 9443 - protein, 17 aa, Artificial Sequence
  Synthetically generated peptide
  VARIANT (1)..(17): Xaa = Any Amino Acid
CCXEYACXNPACTXGXA

SEQ ID NO: 9444 - protein, 16 aa, Artificial Sequence
  Synthetically generated peptide
  VARIANT (1)..(16): Xaa = Any Amino Acid
CCXEYACXNPACTGXA

SEQ ID NO: 9445 - protein, 17 aa, Artificial Sequence
  Synthetically generated peptide
  VARIANT (1)..(17): Xaa = Any Amino Acid
CCXEYACXNPACTGXXA

SEQ ID NO: 9446 - protein, 15 aa, Artificial Sequence
  Synthetically generated peptide
  VARIANT (1)..(15): Xaa = Any Amino Acid
CCXEYACNXPACTGA

SEQ ID NO: 9447 - protein, 16 aa, Artificial Sequence
  Synthetically generated peptide
  VARIANT (1)..(16): Xaa = Any Amino Acid
CCXEYACNXXPACTGA

SEQ ID NO: 9448 - protein, 17 aa, Artificial Sequence
  Synthetically generated peptide
  VARIANT (1)..(17): Xaa = Any Amino Acid
CCXEYACNXXXPACTGA

SEQ ID NO: 9449 - protein, 17 aa, Artificial Sequence
  Synthetically generated peptide
  VARIANT (1)..(17): Xaa = Any Amino Acid
CCXEYACNXXPXACTGA

SEQ ID NO: 9450 - protein, 17 aa, Artificial Sequence
  Synthetically generated peptide
  VARIANT (1)..(17): Xaa = Any Amino Acid
CCXEYACNXXPAXCTGA

SEQ ID NO: 9451 - protein, 17 aa, Artificial Sequence
  Synthetically generated peptide
  VARIANT (1)..(17): Xaa = Any Amino Acid
CCXEYACNXXPACXTGA

SEQ ID NO: 9452 - protein, 17 aa, Artificial Sequence
  Synthetically generated peptide
  VARIANT (1)..(17): Xaa = Any Amino Acid
CCXEYACNXXPACTXGA

SEQ ID NO: 9453 - protein, 17 aa, Artificial Sequence
  Synthetically generated peptide
  VARIANT (1)..(17): Xaa = Any Amino Acid
CCXEYACNXXPACTGXA

SEQ ID NO: 9454 - protein, 16 aa, Artificial Sequence
  Synthetically generated peptide
  VARIANT (1)..(16): Xaa = Any Amino Acid
CCXEYACNXPXACTGA

SEQ ID NO: 9455 - protein, 17 aa, Artificial Sequence
  Synthetically generated peptide
  VARIANT (1)..(17): Xaa = Any Amino Acid
CCXEYACNXPXXACTGA

SEQ ID NO: 9456 - protein, 17 aa, Artificial Sequence
  Synthetically generated peptide
  VARIANT (1)..(17): Xaa = Any Amino Acid
CCXEYACNXPXAXCTGA

SEQ ID NO: 9457 - protein, 17 aa, Artificial Sequence
  Synthetically generated peptide
  VARIANT (1)..(17): Xaa = Any Amino Acid
CCXEYACNXPXACXTGA

SEQ ID NO: 9458 - protein, 17 aa, Artificial Sequence
  Synthetically generated peptide
  VARIANT (1)..(17): Xaa = Any Amino Acid
CCXEYACNXPXACTXGA

SEQ ID NO: 9459 - protein, 17 aa, Artificial Sequence
  Synthetically generated peptide
  VARIANT (1)..(17): Xaa = Any Amino Acid
CCXEYACNXPXACTGXA

SEQ ID NO: 9460 - protein, 16 aa, Artificial Sequence
  Synthetically generated peptide
  VARIANT (1)..(16): Xaa = Any Amino Acid
CCXEYACNXPAXCTGA

SEQ ID NO: 9461 - protein, 17 aa, Artificial Sequence
  Synthetically generated peptide
  VARIANT (1)..(17): Xaa = Any Amino Acid
CCXEYACNXPAXXCTGA

SEQ ID NO: 9462 - protein, 17 aa, Artificial Sequence
  Synthetically generated peptide
  VARIANT (1)..(17): Xaa = Any Amino Acid
CCXEYACNXPAXCXTGA

SEQ ID NO: 9463 - protein, 17 aa, Artificial Sequence
  Synthetically generated peptide
  VARIANT (1)..(17): Xaa = Any Amino Acid
CCXEYACNXPAXCTXGA

SEQ ID NO: 9464 - protein, 17 aa, Artificial Sequence
  Synthetically generated peptide
  VARIANT (1)..(17): Xaa = Any Amino Acid
CCXEYACNXPAXCTGXA

SEQ ID NO: 9465 - protein, 16 aa, Artificial Sequence
  Synthetically generated peptide
  VARIANT (1)..(16): Xaa = Any Amino Acid
CCXEYACNXPACXTGA

SEQ ID NO: 9466 - protein, 17 aa, Artificial Sequence
  Synthetically generated peptide
  VARIANT (1)..(17): Xaa = Any Amino Acid
CCXEYACNXPACXXTGA

SEQ ID NO: 9467 - protein, 17 aa, Artificial Sequence
  Synthetically generated peptide
  VARIANT (1)..(17): Xaa = Any Amino Acid
CCXEYACNXPACXTXGA

SEQ ID NO: 9468 - protein, 17 aa, Artificial Sequence
  Synthetically generated peptide
  VARIANT (1)..(17): Xaa = Any Amino Acid
CCXEYACNXPACXTGXA

SEQ ID NO: 9469 - protein, 16 aa, Artificial Sequence
  Synthetically generated peptide
  VARIANT (1)..(16): Xaa = Any Amino Acid
CCXEYACNXPACTXGA

SEQ ID NO: 9470 - protein, 17 aa, Artificial Sequence
  Synthetically generated peptide
  VARIANT (1)..(17): Xaa = Any Amino Acid
CCXEYACNXPACTXXGA

SEQ ID NO: 9471 - protein, 17 aa, Artificial Sequence
  Synthetically generated peptide
  VARIANT (1)..(17): Xaa = Any Amino Acid
CCXEYACNXPACTXGXA

SEQ ID NO: 9472 - protein, 16 aa, Artificial Sequence
  Synthetically generated peptide
  VARIANT (1)..(16): Xaa = Any Amino Acid
CCXEYACNXPACTGXA

SEQ ID NO: 9473 - protein, 17 aa, Artificial Sequence
  Synthetically generated peptide
  VARIANT (1)..(17): Xaa = Any Amino Acid
CCXEYACNXPACTGXXA

SEQ ID NO: 9474 - protein, 15 aa, Artificial Sequence
  Synthetically generated peptide
  VARIANT (1)..(15): Xaa = Any Amino Acid
CCXEYACNPXACTGA

SEQ ID NO: 9475 - protein, 16 aa, Artificial Sequence
  Synthetically generated peptide
  VARIANT (1)..(16): Xaa = Any Amino Acid
CCXEYACNPXXACTGA

SEQ ID NO: 9476 - protein, 17 aa, Artificial Sequence
  Synthetically generated peptide
  VARIANT (1)..(17): Xaa = Any Amino Acid
CCXEYACNPXXXACTGA

SEQ ID NO: 9477 - protein, 17 aa, Artificial Sequence
  Synthetically generated peptide
  VARIANT (1)..(17): Xaa = Any Amino Acid
CCXEYACNPXXAXCTGA

SEQ ID NO: 9478 - protein, 17 aa, Artificial Sequence
  Synthetically generated peptide
  VARIANT (1)..(17): Xaa = Any Amino Acid
CCXEYACNPXXACXTGA

SEQ ID NO: 9479 - protein, 17 aa, Artificial Sequence
  Synthetically generated peptide
  VARIANT (1)..(17): Xaa = Any Amino Acid
CCXEYACNPXXACTXGA

SEQ ID NO: 9480 - protein, 17 aa, Artificial Sequence
  Synthetically generated peptide
  VARIANT (1)..(17): Xaa = Any Amino Acid
CCXEYACNPXXACTGXA

SEQ ID NO: 9481 - protein, 16 aa, Artificial Sequence
  Synthetically generated peptide
  VARIANT (1)..(16): Xaa = Any Amino Acid
CCXEYACNPXAXCTGA

SEQ ID NO: 9482 - protein, 17 aa, Artificial Sequence
  Synthetically generated peptide
  VARIANT (1)..(17): Xaa = Any Amino Acid
CCXEYACNPXAXXCTGA

SEQ ID NO: 9483 - protein, 17 aa, Artificial Sequence
  Synthetically generated peptide
  VARIANT (1)..(17): Xaa = Any Amino Acid
CCXEYACNPXAXCXTGA

SEQ ID NO: 9484 - protein, 17 aa, Artificial Sequence
  Synthetically generated peptide
  VARIANT (1)..(17): Xaa = Any Amino Acid
CCXEYACNPXAXCTXGA

SEQ ID NO: 9485 - protein, 17 aa, Artificial Sequence
  Synthetically generated peptide
  VARIANT (1)..(17): Xaa = Any Amino Acid
CCXEYACNPXAXCTGXA

SEQ ID NO: 9486 - protein, 16 aa, Artificial Sequence
  Synthetically generated peptide
  VARIANT (1)..(16): Xaa = Any Amino Acid
CCXEYACNPXACXTGA

SEQ ID NO: 9487 - protein, 17 aa, Artificial Sequence
  Synthetically generated peptide
  VARIANT (1)..(17): Xaa = Any Amino Acid
CCXEYACNPXACXXTGA

SEQ ID NO: 9488 - protein, 17 aa, Artificial Sequence
  Synthetically generated peptide
  VARIANT (1)..(17): Xaa = Any Amino Acid
CCXEYACNPXACXTXGA

SEQ ID NO: 9489 - protein, 17 aa, Artificial Sequence
  Synthetically generated peptide
  VARIANT (1)..(17): Xaa = Any Amino Acid
CCXEYACNPXACXTGXA

SEQ ID NO: 9490 - protein, 16 aa, Artificial Sequence
  Synthetically generated peptide
  VARIANT (1)..(16): Xaa = Any Amino Acid
CCXEYACNPXACTXGA

SEQ ID NO: 9491 - protein, 17 aa, Artificial Sequence
  Synthetically generated peptide
  VARIANT (1)..(17): Xaa = Any Amino Acid
CCXEYACNPXACTXXGA

SEQ ID NO: 9492 - protein, 17 aa, Artificial Sequence
  Synthetically generated peptide
  VARIANT (1)..(17): Xaa = Any Amino Acid
CCXEYACNPXACTXGXA

SEQ ID NO: 9493 - protein, 16 aa, Artificial Sequence
  Synthetically generated peptide
  VARIANT (1)..(16): Xaa = Any Amino Acid
CCXEYACNPXACTGXA

SEQ ID NO: 9494 - protein, 17 aa, Artificial Sequence
  Synthetically generated peptide
  VARIANT (1)..(17): Xaa = Any Amino Acid
CCXEYACNPXACTGXXA

SEQ ID NO: 9495 - protein, 15 aa, Artificial Sequence
  Synthetically generated peptide
  VARIANT (1)..(15): Xaa = Any Amino Acid
CCXEYACNPAXCTGA

SEQ ID NO: 9496 - protein, 16 aa, Artificial Sequence
  Synthetically generated peptide
  VARIANT (1)..(16): Xaa = Any Amino Acid
CCXEYACNPAXXCTGA

SEQ ID NO: 9497 - protein, 17 aa, Artificial Sequence
  Synthetically generated peptide
  VARIANT (1)..(17): Xaa = Any Amino Acid
CCXEYACNPAXXXCTGA

SEQ ID NO: 9498 - protein, 17 aa, Artificial Sequence
  Synthetically generated peptide
  VARIANT (1)..(17): Xaa = Any Amino Acid
CCXEYACNPAXXCXTGA

SEQ ID NO: 9499 - protein, 17 aa, Artificial Sequence
  Synthetically generated peptide
  VARIANT (1)..(17): Xaa = Any Amino Acid
CCXEYACNPAXXCTXGA

SEQ ID NO: 9500 - protein, 17 aa, Artificial Sequence
  Synthetically generated peptide
  VARIANT (1)..(17): Xaa = Any Amino Acid
CCXEYACNPAXXCTGXA

SEQ ID NO: 9501 - protein, 16 aa, Artificial Sequence
  Synthetically generated peptide
  VARIANT (1)..(16): Xaa = Any Amino Acid
CCXEYACNPAXCXTGA

SEQ ID NO: 9502 - protein, 17 aa, Artificial Sequence
  Synthetically generated peptide
  VARIANT (1)..(17): Xaa = Any Amino Acid
CCXEYACNPAXCXXTGA

SEQ ID NO: 9503 - protein, 17 aa, Artificial Sequence
  Synthetically generated peptide
  VARIANT (1)..(17): Xaa = Any Amino Acid
CCXEYACNPAXCXTXGA

SEQ ID NO: 9504 - protein, 17 aa, Artificial Sequence
  Synthetically generated peptide
  VARIANT (1)..(17): Xaa = Any Amino Acid
CCXEYACNPAXCXTGXA

SEQ ID NO: 9505 - protein, 16 aa, Artificial Sequence
  Synthetically generated peptide
  VARIANT (1)..(16): Xaa = Any Amino Acid
CCXEYACNPAXCTXGA

SEQ ID NO: 9506 - protein, 17 aa, Artificial Sequence
  Synthetically generated peptide
  VARIANT (1)..(17): Xaa = Any Amino Acid
CCXEYACNPAXCTXXGA

SEQ ID NO: 9507 - protein, 17 aa, Artificial Sequence
  Synthetically generated peptide
  VARIANT (1)..(17): Xaa = Any Amino Acid
CCXEYACNPAXCTXGXA

SEQ ID NO: 9508 - protein, 16 aa, Artificial Sequence
  Synthetically generated peptide
  VARIANT (1)..(16): Xaa = Any Amino Acid
CCXEYACNPAXCTGXA

SEQ ID NO: 9509 - protein, 17 aa, Artificial Sequence
  Synthetically generated peptide
  VARIANT (1)..(17): Xaa = Any Amino Acid
CCXEYACNPAXCTGXXA

SEQ ID NO: 9510 - protein, 15 aa, Artificial Sequence
  Synthetically generated peptide
  VARIANT (1)..(15): Xaa = Any Amino Acid
CCXEYACNPACXTGA

SEQ ID NO: 9511 - protein, 16 aa, Artificial Sequence
  Synthetically generated peptide
  VARIANT (1)..(16): Xaa = Any Amino Acid
CCXEYACNPACXXTGA

SEQ ID NO: 9512 - protein, 17 aa, Artificial Sequence
  Synthetically generated peptide
  VARIANT (1)..(17): Xaa = Any Amino Acid
CCXEYACNPACXXXTGA

SEQ ID NO: 9513 - protein, 17 aa, Artificial Sequence
  Synthetically generated peptide
  VARIANT (1)..(17): Xaa = Any Amino Acid
CCXEYACNPACXXTXGA

SEQ ID NO: 9514 - protein, 17 aa, Artificial Sequence
  Synthetically generated peptide
  VARIANT (1)..(17): Xaa = Any Amino Acid
CCXEYACNPACXXTGXA

SEQ ID NO: 9515 - protein, 16 aa, Artificial Sequence
  Synthetically generated peptide
  VARIANT (1)..(16): Xaa = Any Amino Acid
CCXEYACNPACXTXGA

SEQ ID NO: 9516 - protein, 17 aa, Artificial Sequence
  Synthetically generated peptide
  VARIANT (1)..(17): Xaa = Any Amino Acid
CCXEYACNPACXTXXGA

SEQ ID NO: 9517 - protein, 17 aa, Artificial Sequence
  Synthetically generated peptide
  VARIANT (1)..(17): Xaa = Any Amino Acid
CCXEYACNPACXTXGXA

SEQ ID NO: 9518 - protein, 16 aa, Artificial Sequence
  Synthetically generated peptide
  VARIANT (1)..(16): Xaa = Any Amino Acid
CCXEYACNPACXTGXA

SEQ ID NO: 9519 - protein, 17 aa, Artificial Sequence
  Synthetically generated peptide
  VARIANT (1)..(17): Xaa = Any Amino Acid
CCXEYACNPACXTGXXA

SEQ ID NO: 9520 - protein, 15 aa, Artificial Sequence
  Synthetically generated peptide
  VARIANT (1)..(15): Xaa = Any Amino Acid
CCXEYACNPACTXGA

SEQ ID NO: 9521 - protein, 16 aa, Artificial Sequence
  Synthetically generated peptide
  VARIANT (1)..(16): Xaa = Any Amino Acid
CCXEYACNPACTXXGA

SEQ ID NO: 9522 - protein, 17 aa, Artificial Sequence
  Synthetically generated peptide
  VARIANT (1)..(17): Xaa = Any Amino Acid
CCXEYACNPACTXXXGA

SEQ ID NO: 9523 - protein, 17 aa, Artificial Sequence
  Synthetically generated peptide
  VARIANT (1)..(17): Xaa = Any Amino Acid
CCXEYACNPACTXXGXA

SEQ ID NO: 9524 - protein, 16 aa, Artificial Sequence
  Synthetically generated peptide
  VARIANT (1)..(16): Xaa = Any Amino Acid
CCXEYACNPACTXGXA

SEQ ID NO: 9525 - protein, 17 aa, Artificial Sequence
  Synthetically generated peptide
  VARIANT (1)..(17): Xaa = Any Amino Acid
CCXEYACNPACTXGXXA

SEQ ID NO: 9526 - protein, 15 aa, Artificial Sequence
  Synthetically generated peptide
  VARIANT (1)..(15): Xaa = Any Amino Acid
CCXEYACNPACTGXA

SEQ ID NO: 9527 - protein, 16 aa, Artificial Sequence
  Synthetically generated peptide
  VARIANT (1)..(16): Xaa = Any Amino Acid
CCXEYACNPACTGXXA

SEQ ID NO: 9528 - protein, 17 aa, Artificial Sequence
  Synthetically generated peptide
  VARIANT (1)..(17): Xaa = Any Amino Acid
CCXEYACNPACTGXXXA

SEQ ID NO: 9529 - protein, 14 aa, Artificial Sequence
  Synthetically generated peptide
  VARIANT (1)..(14): Xaa = Any Amino Acid
CCEXYACNPACTGA

SEQ ID NO: 9530 - protein, 15 aa, Artificial Sequence
  Synthetically generated peptide
  VARIANT (1)..(15): Xaa = Any Amino Acid
CCEXXYACNPACTGA

SEQ ID NO: 9531 - protein, 16 aa, Artificial Sequence
  Synthetically generated peptide
  VARIANT (1)..(16): Xaa = Any Amino Acid
CCEXXXYACNPACTGA

SEQ ID NO: 9532 - protein, 17 aa, Artificial Sequence
  Synthetically generated peptide
  VARIANT (1)..(17): Xaa = Any Amino Acid
CCEXXXXYACNPACTGA

SEQ ID NO: 9533 - protein, 17 aa, Artificial Sequence
  Synthetically generated peptide
  VARIANT (1)..(17): Xaa = Any Amino Acid
CCEXXXYXACNPACTGA

SEQ ID NO: 9534 - protein, 17 aa, Artificial Sequence
  Synthetically generated peptide
  VARIANT (1)..(17): Xaa = Any Amino Acid
CCEXXXYACXNPACTGA

SEQ ID NO: 9535 - protein, 17 aa, Artificial Sequence
  Synthetically generated peptide
  VARIANT (1)..(17): Xaa = Any Amino Acid
CCEXXXYACNXPACTGA

SEQ ID NO: 9536 - protein, 17 aa, Artificial Sequence
  Synthetically generated peptide
  VARIANT (1)..(17): Xaa = Any Amino Acid
CCEXXXYACNPXACTGA

SEQ ID NO: 9537 - protein, 17 aa, Artificial Sequence
  Synthetically generated peptide
  VARIANT (1)..(17): Xaa = Any Amino Acid
CCEXXXYACNPAXCTGA

SEQ ID NO: 9538 - protein, 17 aa, Artificial Sequence
  Synthetically generated peptide
  VARIANT (1)..(17): Xaa = Any Amino Acid
CCEXXXYACNPACXTGA

SEQ ID NO: 9539 - protein, 17 aa, Artificial Sequence
  Synthetically generated peptide
  VARIANT (1)..(17): Xaa = Any Amino Acid
CCEXXXYACNPACTXGA

SEQ ID NO: 9540 - protein, 17 aa, Artificial Sequence
  Synthetically generated peptide
  VARIANT (1)..(17): Xaa = Any Amino Acid
CCEXXXYACNPACTGXA

SEQ ID NO: 9541 - protein, 16 aa, Artificial Sequence
  Synthetically generated peptide
  VARIANT (1)..(16): Xaa = Any Amino Acid
CCEXXYXACNPACTGA

SEQ ID NO: 9542 - protein, 17 aa, Artificial Sequence
  Synthetically generated peptide
  VARIANT (1)..(17): Xaa = Any Amino Acid
CCEXXYXXACNPACTGA

SEQ ID NO: 9543 - protein, 17 aa, Artificial Sequence
  Synthetically generated peptide
  VARIANT (1)..(17): Xaa = Any Amino Acid
CCEXXYXACXNPACTGA

SEQ ID NO: 9544 - protein, 17 aa, Artificial Sequence
  Synthetically generated peptide
  VARIANT (1)..(17): Xaa = Any Amino Acid
CCEXXYXACNXPACTGA

SEQ ID NO: 9545 - protein, 17 aa, Artificial Sequence
  Synthetically generated peptide
  VARIANT (1)..(17): Xaa = Any Amino Acid
CCEXXYXACNPXACTGA

SEQ ID NO: 9546 - protein, 17 aa, Artificial Sequence
  Synthetically generated peptide
  VARIANT (1)..(17): Xaa = Any Amino Acid
CCEXXYXACNPAXCTGA

SEQ ID NO: 9547 - protein, 17 aa, Artificial Sequence
  Synthetically generated peptide
  VARIANT (1)..(17): Xaa = Any Amino Acid
CCEXXYXACNPACXTGA

SEQ ID NO: 9548 - protein, 17 aa, Artificial Sequence
  Synthetically generated peptide
  VARIANT (1)..(17): Xaa = Any Amino Acid
CCEXXYXACNPACTXGA

SEQ ID NO: 9549 - protein, 17 aa, Artificial Sequence
  Synthetically generated peptide
  VARIANT (1)..(17): Xaa = Any Amino Acid
CCEXXYXACNPACTGXA

SEQ ID NO: 9550 - protein, 16 aa, Artificial Sequence
  Synthetically generated peptide
  VARIANT (1)..(16): Xaa = Any Amino Acid
CCEXXYACXNPACTGA

SEQ ID NO: 9551 - protein, 17 aa, Artificial Sequence
  Synthetically generated peptide
  VARIANT (1)..(17): Xaa = Any Amino Acid
CCEXXYACXXNPACTGA

SEQ ID NO: 9552 - protein, 17 aa, Artificial Sequence
  Synthetically generated peptide
  VARIANT (1)..(17): Xaa = Any Amino Acid
CCEXXYACXNXPACTGA

SEQ ID NO: 9553 - protein, 17 aa, Artificial Sequence
  Synthetically generated peptide
  VARIANT (1)..(17): Xaa = Any Amino Acid
CCEXXYACXNPXACTGA

SEQ ID NO: 9554 - protein, 17 aa, Artificial Sequence
  Synthetically generated peptide
  VARIANT (1)..(17): Xaa = Any Amino Acid
CCEXXYACXNPAXCTGA

SEQ ID NO: 9555 - protein, 17 aa, Artificial Sequence
  Synthetically generated peptide
  VARIANT (1)..(17): Xaa = Any Amino Acid
CCEXXYACXNPACXTGA

SEQ ID NO: 9556 - protein, 17 aa, Artificial Sequence
  Synthetically generated peptide
  VARIANT (1)..(17): Xaa = Any Amino Acid
CCEXXYACXNPACTXGA

SEQ ID NO: 9557 - protein, 17 aa, Artificial Sequence
  Synthetically generated peptide
  VARIANT (1)..(17): Xaa = Any Amino Acid
CCEXXYACXNPACTGXA

SEQ ID NO: 9558 - protein, 16 aa, Artificial Sequence
  Synthetically generated peptide
  VARIANT (1)..(16): Xaa = Any Amino Acid
CCEXXYACNXPACTGA

SEQ ID NO: 9559 - protein, 17 aa, Artificial Sequence
  Synthetically generated peptide
  VARIANT (1)..(17): Xaa = Any Amino Acid
CCEXXYACNXXPACTGA

SEQ ID NO: 9560 - protein, 17 aa, Artificial Sequence
  Synthetically generated peptide
  VARIANT (1)..(17): Xaa = Any Amino Acid
CCEXXYACNXPXACTGA

SEQ ID NO: 9561 - protein, 17 aa, Artificial Sequence
  Synthetically generated peptide
  VARIANT (1)..(17): Xaa = Any Amino Acid
CCEXXYACNXPAXCTGA

SEQ ID NO: 9562 - protein, 17 aa, Artificial Sequence
  Synthetically generated peptide
  VARIANT (1)..(17): Xaa = Any Amino Acid
CCEXXYACNXPACXTGA

SEQ ID NO: 9563 - protein, 17 aa, Artificial Sequence
  Synthetically generated peptide
  VARIANT (1)..(17): Xaa = Any Amino Acid
CCEXXYACNXPACTXGA

SEQ ID NO: 9564 - protein, 17 aa, Artificial Sequence
  Synthetically generated peptide
  VARIANT (1)..(17): Xaa = Any Amino Acid
CCEXXYACNXPACTGXA

SEQ ID NO: 9565 - protein, 16 aa, Artificial Sequence
  Synthetically generated peptide
  VARIANT (1)..(16): Xaa = Any Amino Acid
CCEXXYACNPXACTGA

SEQ ID NO: 9566 - protein, 17 aa, Artificial Sequence
  Synthetically generated peptide
  VARIANT (1)..(17): Xaa = Any Amino Acid
CCEXXYACNPXXACTGA

SEQ ID NO: 9567 - protein, 17 aa, Artificial Sequence
  Synthetically generated peptide
  VARIANT (1)..(17): Xaa = Any Amino Acid
CCEXXYACNPXAXCTGA

SEQ ID NO: 9568 - protein, 17 aa, Artificial Sequence
  Synthetically generated peptide
  VARIANT (1)..(17): Xaa = Any Amino Acid
CCEXXYACNPXACXTGA

SEQ ID NO: 9569 - protein, 17 aa, Artificial Sequence
  Synthetically generated peptide
  VARIANT (1)..(17): Xaa = Any Amino Acid
CCEXXYACNPXACTXGA

SEQ ID NO: 9570 - protein, 17 aa, Artificial Sequence
  Synthetically generated peptide
  VARIANT (1)..(17): Xaa = Any Amino Acid
CCEXXYACNPXACTGXA

SEQ ID NO: 9571 - protein, 16 aa, Artificial Sequence
  Synthetically generated peptide
  VARIANT (1)..(16): Xaa = Any Amino Acid
CCEXXYACNPAXCTGA

SEQ ID NO: 9572 - protein, 17 aa, Artificial Sequence
  Synthetically generated peptide
  VARIANT (1)..(17): Xaa = Any Amino Acid
CCEXXYACNPAXXCTGA

SEQ ID NO: 9573 - protein, 17 aa, Artificial Sequence
  Synthetically generated peptide
  VARIANT (1)..(17): Xaa = Any Amino Acid
CCEXXYACNPAXCXTGA

SEQ ID NO: 9574 - protein, 17 aa, Artificial Sequence
  Synthetically generated peptide
  VARIANT (1)..(17): Xaa = Any Amino Acid
CCEXXYACNPAXCTXGA

SEQ ID NO: 9575 - protein, 17 aa, Artificial Sequence
  Synthetically generated peptide
  VARIANT (1)..(17): Xaa = Any Amino Acid
CCEXXYACNPAXCTGXA

SEQ ID NO: 9576 - protein, 16 aa, Artificial Sequence
  Synthetically generated peptide
  VARIANT (1)..(16): Xaa = Any Amino Acid
CCEXXYACNPACXTGA

SEQ ID NO: 9577 - protein, 17 aa, Artificial Sequence
  Synthetically generated peptide
  VARIANT (1)..(17): Xaa = Any Amino Acid
CCEXXYACNPACXXTGA

SEQ ID NO: 9578 - protein, 17 aa, Artificial Sequence
  Synthetically generated peptide
  VARIANT (1)..(17): Xaa = Any Amino Acid
CCEXXYACNPACXTXGA

SEQ ID NO: 9579 - protein, 17 aa, Artificial Sequence
  Synthetically generated peptide
  VARIANT (1)..(17): Xaa = Any Amino Acid
CCEXXYACNPACXTGXA

SEQ ID NO: 9580 - protein, 16 aa, Artificial Sequence
  Synthetically generated peptide
  VARIANT (1)..(16): Xaa = Any Amino Acid
CCEXXYACNPACTXGA

SEQ ID NO: 9581 - protein, 17 aa, Artificial Sequence
  Synthetically generated peptide
  VARIANT (1)..(17): Xaa = Any Amino Acid
CCEXXYACNPACTXXGA

SEQ ID NO: 9582 - protein, 17 aa, Artificial Sequence
  Synthetically generated peptide
  VARIANT (1)..(17): Xaa = Any Amino Acid
CCEXXYACNPACTXGXA

SEQ ID NO: 9583 - protein, 16 aa, Artificial Sequence
  Synthetically generated peptide
  VARIANT (1)..(16): Xaa = Any Amino Acid
CCEXXYACNPACTGXA

SEQ ID NO: 9584 - protein, 17 aa, Artificial Sequence
  Synthetically generated peptide
  VARIANT (1)..(17): Xaa = Any Amino Acid
CCEXXYACNPACTGXXA

SEQ ID NO: 9585 - protein, 15 aa, Artificial Sequence
  Synthetically generated peptide
  VARIANT (1)..(15): Xaa = Any Amino Acid
CCEXYXACNPACTGA

SEQ ID NO: 9586 - protein, 16 aa, Artificial Sequence
  Synthetically generated peptide
  VARIANT (1)..(16): Xaa = Any Amino Acid
CCEXYXXACNPACTGA

SEQ ID NO: 9587 - protein, 17 aa, Artificial Sequence
  Synthetically generated peptide
  VARIANT (1)..(17): Xaa = Any Amino Acid
CCEXYXXXACNPACTGA

SEQ ID NO: 9588 - protein, 17 aa, Artificial Sequence
  Synthetically generated peptide
  VARIANT (1)..(17): Xaa = Any Amino Acid
CCEXYXXACXNPACTGA

SEQ ID NO: 9589 - protein, 17 aa, Artificial Sequence
  Synthetically generated peptide
  VARIANT (1)..(17): Xaa = Any Amino Acid
CCEXYXXACNXPACTGA

SEQ ID NO: 9590 - protein, 17 aa, Artificial Sequence
  Synthetically generated peptide
  VARIANT (1)..(17): Xaa = Any Amino Acid
CCEXYXXACNPXACTGA

SEQ ID NO: 9591 - protein, 17 aa, Artificial Sequence
  Synthetically generated peptide
  VARIANT (1)..(17): Xaa = Any Amino Acid
CCEXYXXACNPAXCTGA

SEQ ID NO: 9592 - protein, 17 aa, Artificial Sequence
  Synthetically generated peptide
  VARIANT (1)..(17): Xaa = Any Amino Acid
CCEXYXXACNPACXTGA

SEQ ID NO: 9593 - protein, 17 aa, Artificial Sequence
  Synthetically generated peptide
  VARIANT (1)..(17): Xaa = Any Amino Acid
CCEXYXXACNPACTXGA

SEQ ID NO: 9594 - protein, 17 aa, Artificial Sequence
  Synthetically generated peptide
  VARIANT (1)..(17): Xaa = Any Amino Acid
CCEXYXXACNPACTGXA

SEQ ID NO: 9595 - protein, 16 aa, Artificial Sequence
  Synthetically generated peptide
  VARIANT (1)..(16): Xaa = Any Amino Acid
CCEXYXACXNPACTGA

SEQ ID NO: 9596 - protein, 17 aa, Artificial Sequence
  Synthetically generated peptide
  VARIANT (1)..(17): Xaa = Any Amino Acid
CCEXYXACXXNPACTGA

SEQ ID NO: 9597 - protein, 17 aa, Artificial Sequence
  Synthetically generated peptide
  VARIANT (1)..(17): Xaa = Any Amino Acid
CCEXYXACXNXPACTGA

SEQ ID NO: 9598 - protein, 17 aa, Artificial Sequence
  Synthetically generated peptide
  VARIANT (1)..(17): Xaa = Any Amino Acid
CCEXYXACXNPXACTGA

SEQ ID NO: 9599 - protein, 17 aa, Artificial Sequence
  Synthetically generated peptide
  VARIANT (1)..(17): Xaa = Any Amino Acid
CCEXYXACXNPAXCTGA

SEQ ID NO: 9600 - protein, 17 aa, Artificial Sequence
  Synthetically generated peptide
  VARIANT (1)..(17): Xaa = Any Amino Acid
CCEXYXACXNPACXTGA

SEQ ID NO: 9601 - protein, 17 aa, Artificial Sequence
  Synthetically generated peptide
  VARIANT (1)..(17): Xaa = Any Amino Acid
CCEXYXACXNPACTXGA

SEQ ID NO: 9602 - protein, 17 aa, Artificial Sequence
  Synthetically generated peptide
  VARIANT (1)..(17): Xaa = Any Amino Acid
CCEXYXACXNPACTGXA

SEQ ID NO: 9603 - protein, 16 aa, Artificial Sequence
  Synthetically generated peptide
  VARIANT (1)..(16): Xaa = Any Amino Acid
CCEXYXACNXPACTGA

SEQ ID NO: 9604 - protein, 17 aa, Artificial Sequence
  Synthetically generated peptide
  VARIANT (1)..(17): Xaa = Any Amino Acid
CCEXYXACNXXPACTGA

SEQ ID NO: 9605 - protein, 17 aa, Artificial Sequence
  Synthetically generated peptide
  VARIANT (1)..(17): Xaa = Any Amino Acid
CCEXYXACNXPXACTGA

SEQ ID NO: 9606 - protein, 17 aa, Artificial Sequence
  Synthetically generated peptide
  VARIANT (1)..(17): Xaa = Any Amino Acid
CCEXYXACNXPAXCTGA

SEQ ID NO: 9607 - protein, 17 aa, Artificial Sequence
  Synthetically generated peptide
  VARIANT (1)..(17): Xaa = Any Amino Acid
CCEXYXACNXPACXTGA

SEQ ID NO: 9608 - protein, 17 aa, Artificial Sequence
  Synthetically generated peptide
  VARIANT (1)..(17): Xaa = Any Amino Acid
CCEXYXACNXPACTXGA

SEQ ID NO: 9609 - protein, 17 aa, Artificial Sequence
  Synthetically generated peptide
  VARIANT (1)..(17): Xaa = Any Amino Acid
CCEXYXACNXPACTGXA

SEQ ID NO: 9610 - protein, 16 aa, Artificial Sequence
  Synthetically generated peptide
  VARIANT (1)..(16): Xaa = Any Amino Acid
CCEXYXACNPXACTGA

SEQ ID NO: 9611 - protein, 17 aa, Artificial Sequence
  Synthetically generated peptide
  VARIANT (1)..(17): Xaa = Any Amino Acid
CCEXYXACNPXXACTGA

SEQ ID NO: 9612 - protein, 17 aa, Artificial Sequence
  Synthetically generated peptide
  VARIANT (1)..(17): Xaa = Any Amino Acid
CCEXYXACNPXAXCTGA

SEQ ID NO: 9613 - protein, 17 aa, Artificial Sequence
  Synthetically generated peptide
  VARIANT (1)..(17): Xaa = Any Amino Acid
CCEXYXACNPXACXTGA

SEQ ID NO: 9614 - protein, 17 aa, Artificial Sequence
  Synthetically generated peptide
  VARIANT (1)..(17): Xaa = Any Amino Acid
CCEXYXACNPXACTXGA

SEQ ID NO: 9615 - protein, 17 aa, Artificial Sequence
  Synthetically generated peptide
  VARIANT (1)..(17): Xaa = Any Amino Acid
CCEXYXACNPXACTGXA

SEQ ID NO: 9616 - protein, 16 aa, Artificial Sequence
  Synthetically generated peptide
  VARIANT (1)..(16): Xaa = Any Amino Acid
CCEXYXACNPAXCTGA

SEQ ID NO: 9617 - protein, 17 aa, Artificial Sequence
  Synthetically generated peptide
  VARIANT (1)..(17): Xaa = Any Amino Acid
CCEXYXACNPAXXCTGA

SEQ ID NO: 9618 - protein, 17 aa, Artificial Sequence
  Synthetically generated peptide
  VARIANT (1)..(17): Xaa = Any Amino Acid
CCEXYXACNPAXCXTGA

SEQ ID NO: 9619 - protein, 17 aa, Artificial Sequence
  Synthetically generated peptide
  VARIANT (1)..(17): Xaa = Any Amino Acid
CCEXYXACNPAXCTXGA

SEQ ID NO: 9620 - protein, 17 aa, Artificial Sequence
  Synthetically generated peptide
  VARIANT (1)..(17): Xaa = Any Amino Acid
CCEXYXACNPAXCTGXA

SEQ ID NO: 9621 - protein, 16 aa, Artificial Sequence
  Synthetically generated peptide
  VARIANT (1)..(16): Xaa = Any Amino Acid
CCEXYXACNPACXTGA

SEQ ID NO: 9622 - protein, 17 aa, Artificial Sequence
  Synthetically generated peptide
  VARIANT (1)..(17): Xaa = Any Amino Acid
CCEXYXACNPACXXTGA

SEQ ID NO: 9623 - protein, 17 aa, Artificial Sequence
  Synthetically generated peptide
  VARIANT (1)..(17): Xaa = Any Amino Acid
CCEXYXACNPACXTXGA

SEQ ID NO: 9624 - protein, 17 aa, Artificial Sequence
  Synthetically generated peptide
  VARIANT (1)..(17): Xaa = Any Amino Acid
CCEXYXACNPACXTGXA

SEQ ID NO: 9625 - protein, 16 aa, Artificial Sequence
  Synthetically generated peptide
  VARIANT (1)..(16): Xaa = Any Amino Acid
CCEXYXACNPACTXGA

SEQ ID NO: 9626 - protein, 17 aa, Artificial Sequence
  Synthetically generated peptide
  VARIANT (1)..(17): Xaa = Any Amino Acid
CCEXYXACNPACTXXGA

SEQ ID NO: 9627 - protein, 17 aa, Artificial Sequence
  Synthetically generated peptide
  VARIANT (1)..(17): Xaa = Any Amino Acid
CCEXYXACNPACTXGXA

SEQ ID NO: 9628 - protein, 16 aa, Artificial Sequence
  Synthetically generated peptide
  VARIANT (1)..(16): Xaa = Any Amino Acid
CCEXYXACNPACTGXA

SEQ ID NO: 9629 - protein, 17 aa, Artificial Sequence
  Synthetically generated peptide
  VARIANT (1)..(17): Xaa = Any Amino Acid
CCEXYXACNPACTGXXA

SEQ ID NO: 9630 - protein, 15 aa, Artificial Sequence
  Synthetically generated peptide
  VARIANT (1)..(15): Xaa = Any Amino Acid
CCEXYACXNPACTGA

SEQ ID NO: 9631 - protein, 16 aa, Artificial Sequence
  Synthetically generated peptide
  VARIANT (1)..(16): Xaa = Any Amino Acid
CCEXYACXXNPACTGA

SEQ ID NO: 9632 - protein, 17 aa, Artificial Sequence
  Synthetically generated peptide
  VARIANT (1)..(17): Xaa = Any Amino Acid
CCEXYACXXXNPACTGA

SEQ ID NO: 9633 - protein, 17 aa, Artificial Sequence
  Synthetically generated peptide
  VARIANT (1)..(17): Xaa = Any Amino Acid
CCEXYACXXNXPACTGA

SEQ ID NO: 9634 - protein, 17 aa, Artificial Sequence
  Synthetically generated peptide
  VARIANT (1)..(17): Xaa = Any Amino Acid
CCEXYACXXNPXACTGA

SEQ ID NO: 9635 - protein, 17 aa, Artificial Sequence
  Synthetically generated peptide
  VARIANT (1)..(17): Xaa = Any Amino Acid
CCEXYACXXNPAXCTGA

SEQ ID NO: 9636 - protein, 17 aa, Artificial Sequence
  Synthetically generated peptide
  VARIANT (1)..(17): Xaa = Any Amino Acid
CCEXYACXXNPACXTGA

SEQ ID NO: 9637 - protein, 17 aa, Artificial Sequence
  Synthetically generated peptide
  VARIANT (1)..(17): Xaa = Any Amino Acid
CCEXYACXXNPACTXGA

SEQ ID NO: 9638 - protein, 17 aa, Artificial Sequence
  Synthetically generated peptide
  VARIANT (1)..(17): Xaa = Any Amino Acid
CCEXYACXXNPACTGXA

SEQ ID NO: 9639 - protein, 16 aa, Artificial Sequence
  Synthetically generated peptide
  VARIANT (1)..(16): Xaa = Any Amino Acid
CCEXYACXNXPACTGA

SEQ ID NO: 9640 - protein, 17 aa, Artificial Sequence
  Synthetically generated peptide
  VARIANT (1)..(17): Xaa = Any Amino Acid
CCEXYACXNXXPACTGA

SEQ ID NO: 9641 - protein, 17 aa, Artificial Sequence
  Synthetically generated peptide
  VARIANT (1)..(17): Xaa = Any Amino Acid
CCEXYACXNXPXACTGA

SEQ ID NO: 9642 - protein, 17 aa, Artificial Sequence
  Synthetically generated peptide
  VARIANT (1)..(17): Xaa = Any Amino Acid
CCEXYACXNXPAXCTGA

SEQ ID NO: 9643 - protein, 17 aa, Artificial Sequence
  Synthetically generated peptide
  VARIANT (1)..(17): Xaa = Any Amino Acid
CCEXYACXNXPACXTGA

SEQ ID NO: 9644 - protein, 17 aa, Artificial Sequence
  Synthetically generated peptide
  VARIANT (1)..(17): Xaa = Any Amino Acid
CCEXYACXNXPACTXGA

SEQ ID NO: 9645 - protein, 17 aa, Artificial Sequence
  Synthetically generated peptide
  VARIANT (1)..(17): Xaa = Any Amino Acid
CCEXYACXNXPACTGXA

SEQ ID NO: 9646 - protein, 16 aa, Artificial Sequence
  Synthetically generated peptide
  VARIANT (1)..(16): Xaa = Any Amino Acid
CCEXYACXNPXACTGA

SEQ ID NO: 9647 - protein, 17 aa, Artificial Sequence
  Synthetically generated peptide
  VARIANT (1)..(17): Xaa = Any Amino Acid
CCEXYACXNPXXACTGA

SEQ ID NO: 9648 - protein, 17 aa, Artificial Sequence
  Synthetically generated peptide
  VARIANT (1)..(17): Xaa = Any Amino Acid
CCEXYACXNPXAXCTGA

SEQ ID NO: 9649 - protein, 17 aa, Artificial Sequence
  Synthetically generated peptide
  VARIANT (1)..(17): Xaa = Any Amino Acid
CCEXYACXNPXACXTGA

SEQ ID NO: 9650 - protein, 17 aa, Artificial Sequence
  Synthetically generated peptide
  VARIANT (1)..(17): Xaa = Any Amino Acid
CCEXYACXNPXACTXGA

SEQ ID NO: 9651 - protein, 17 aa, Artificial Sequence
  Synthetically generated peptide
  VARIANT (1)..(17): Xaa = Any Amino Acid
CCEXYACXNPXACTGXA

SEQ ID NO: 9652 - protein, 16 aa, Artificial Sequence
  Synthetically generated peptide
  VARIANT (1)..(16): Xaa = Any Amino Acid
CCEXYACXNPAXCTGA

SEQ ID NO: 9653 - protein, 17 aa, Artificial Sequence
  Synthetically generated peptide
  VARIANT (1)..(17): Xaa = Any Amino Acid
CCEXYACXNPAXXCTGA

SEQ ID NO: 9654 - protein, 17 aa, Artificial Sequence
  Synthetically generated peptide
  VARIANT (1)..(17): Xaa = Any Amino Acid
CCEXYACXNPAXCXTGA

SEQ ID NO: 9655 - protein, 17 aa, Artificial Sequence
  Synthetically generated peptide
  VARIANT (1)..(17): Xaa = Any Amino Acid
CCEXYACXNPAXCTXGA

SEQ ID NO: 9656 - protein, 17 aa, Artificial Sequence
  Synthetically generated peptide
  VARIANT (1)..(17): Xaa = Any Amino Acid
CCEXYACXNPAXCTGXA

SEQ ID NO: 9657 - protein, 16 aa, Artificial Sequence
  Synthetically generated peptide
  VARIANT (1)..(16): Xaa = Any Amino Acid
CCEXYACXNPACXTGA

SEQ ID NO: 9658 - protein, 17 aa, Artificial Sequence
  Synthetically generated peptide
  VARIANT (1)..(17): Xaa = Any Amino Acid
CCEXYACXNPACXXTGA

SEQ ID NO: 9659 - protein, 17 aa, Artificial Sequence
  Synthetically generated peptide
  VARIANT (1)..(17): Xaa = Any Amino Acid
CCEXYACXNPACXTXGA

SEQ ID NO: 9660 - protein, 17 aa, Artificial Sequence
  Synthetically generated peptide
  VARIANT (1)..(17): Xaa = Any Amino Acid
CCEXYACXNPACXTGXA

SEQ ID NO: 9661 - protein, 16 aa, Artificial Sequence
  Synthetically generated peptide
  VARIANT (1)..(16): Xaa = Any Amino Acid
CCEXYACXNPACTXGA

SEQ ID NO: 9662 - protein, 17 aa, Artificial Sequence
  Synthetically generated peptide
  VARIANT (1)..(17): Xaa = Any Amino Acid
CCEXYACXNPACTXXGA

SEQ ID NO: 9663 - protein, 17 aa, Artificial Sequence
  Synthetically generated peptide
  VARIANT (1)..(17): Xaa = Any Amino Acid
CCEXYACXNPACTXGXA

SEQ ID NO: 9664 - protein, 16 aa, Artificial Sequence
  Synthetically generated peptide
  VARIANT (1)..(16): Xaa = Any Amino Acid
CCEXYACXNPACTGXA

SEQ ID NO: 9665 - protein, 17 aa, Artificial Sequence
  Synthetically generated peptide
  VARIANT (1)..(17): Xaa = Any Amino Acid
CCEXYACXNPACTGXXA

SEQ ID NO: 9666 - protein, 15 aa, Artificial Sequence
  Synthetically generated peptide
  VARIANT (1)..(15): Xaa = Any Amino Acid
CCEXYACNXPACTGA

SEQ ID NO: 9667 - protein, 16 aa, Artificial Sequence
  Synthetically generated peptide
  VARIANT (1)..(16): Xaa = Any Amino Acid
CCEXYACNXXPACTGA

SEQ ID NO: 9668 - protein, 17 aa, Artificial Sequence
  Synthetically generated peptide
  VARIANT (1)..(17): Xaa = Any Amino Acid
CCEXYACNXXXPACTGA

SEQ ID NO: 9669 - protein, 17 aa, Artificial Sequence
  Synthetically generated peptide
  VARIANT (1)..(17): Xaa = Any Amino Acid
CCEXYACNXXPXACTGA

SEQ ID NO: 9670 - protein, 17 aa, Artificial Sequence
  Synthetically generated peptide
  VARIANT (1)..(17): Xaa = Any Amino Acid
CCEXYACNXXPAXCTGA

SEQ ID NO: 9671 - protein, 17 aa, Artificial Sequence
  Synthetically generated peptide
  VARIANT (1)..(17): Xaa = Any Amino Acid
CCEXYACNXXPACXTGA

SEQ ID NO: 9672 - protein, 17 aa, Artificial Sequence
  Synthetically generated peptide
  VARIANT (1)..(17): Xaa = Any Amino Acid
CCEXYACNXXPACTXGA

SEQ ID NO: 9673 - protein, 17 aa, Artificial Sequence
  Synthetically generated peptide
  VARIANT (1)..(17): Xaa = Any Amino Acid
CCEXYACNXXPACTGXA

SEQ ID NO: 9674 - protein, 16 aa, Artificial Sequence
  Synthetically generated peptide
  VARIANT (1)..(16): Xaa = Any Amino Acid
CCEXYACNXPXACTGA

SEQ ID NO: 9675 - protein, 17 aa, Artificial Sequence
  Synthetically generated peptide
  VARIANT (1)..(17): Xaa = Any Amino Acid
CCEXYACNXPXXACTGA

SEQ ID NO: 9676 - protein, 17 aa, Artificial Sequence
  Synthetically generated peptide
  VARIANT (1)..(17): Xaa = Any Amino Acid
CCEXYACNXPXAXCTGA

SEQ ID NO: 9677 - protein, 17 aa, Artificial Sequence
  Synthetically generated peptide
  VARIANT (1)..(17): Xaa = Any Amino Acid
CCEXYACNXPXACXTGA

SEQ ID NO: 9678 - protein, 17 aa, Artificial Sequence
  Synthetically generated peptide
  VARIANT (1)..(17): Xaa = Any Amino Acid
CCEXYACNXPXACTXGA

SEQ ID NO: 9679 - protein, 17 aa, Artificial Sequence
  Synthetically generated peptide
  VARIANT (1)..(17): Xaa = Any Amino Acid
CCEXYACNXPXACTGXA

SEQ ID NO: 9680 - protein, 16 aa, Artificial Sequence
  Synthetically generated peptide
  VARIANT (1)..(16): Xaa = Any Amino Acid
CCEXYACNXPAXCTGA

SEQ ID NO: 9681 - protein, 17 aa, Artificial Sequence
  Synthetically generated peptide
  VARIANT (1)..(17): Xaa = Any Amino Acid
CCEXYACNXPAXXCTGA

SEQ ID NO: 9682 - protein, 17 aa, Artificial Sequence
  Synthetically generated peptide
  VARIANT (1)..(17): Xaa = Any Amino Acid
CCEXYACNXPAXCXTGA

SEQ ID NO: 9683 - protein, 17 aa, Artificial Sequence
  Synthetically generated peptide
  VARIANT (1)..(17): Xaa = Any Amino Acid
CCEXYACNXPAXCTXGA

SEQ ID NO: 9684 - protein, 17 aa, Artificial Sequence
  Synthetically generated peptide
  VARIANT (1)..(17): Xaa = Any Amino Acid
CCEXYACNXPAXCTGXA

SEQ ID NO: 9685 - protein, 16 aa, Artificial Sequence
  Synthetically generated peptide
  VARIANT (1)..(16): Xaa = Any Amino Acid
CCEXYACNXPACXTGA

SEQ ID NO: 9686 - protein, 17 aa, Artificial Sequence
  Synthetically generated peptide
  VARIANT (1)..(17): Xaa = Any Amino Acid
CCEXYACNXPACXXTGA

SEQ ID NO: 9687 - protein, 17 aa, Artificial Sequence
  Synthetically generated peptide
  VARIANT (1)..(17): Xaa = Any Amino Acid
CCEXYACNXPACXTXGA

SEQ ID NO: 9688 - protein, 17 aa, Artificial Sequence
  Synthetically generated peptide
  VARIANT (1)..(17): Xaa = Any Amino Acid
CCEXYACNXPACXTGXA

SEQ ID NO: 9689 - protein, 16 aa, Artificial Sequence
  Synthetically generated peptide
  VARIANT (1)..(16): Xaa = Any Amino Acid
CCEXYACNXPACTXGA

SEQ ID NO: 9690 - protein, 17 aa, Artificial Sequence
  Synthetically generated peptide
  VARIANT (1)..(17): Xaa = Any Amino Acid
CCEXYACNXPACTXXGA

SEQ ID NO: 9691 - protein, 17 aa, Artificial Sequence
  Synthetically generated peptide
  VARIANT (1)..(17): Xaa = Any Amino Acid
CCEXYACNXPACTXGXA

SEQ ID NO: 9692 - protein, 16 aa, Artificial Sequence
  Synthetically generated peptide
  VARIANT (1)..(16): Xaa = Any Amino Acid
CCEXYACNXPACTGXA

SEQ ID NO: 9693 - protein, 17 aa, Artificial Sequence
  Synthetically generated peptide
  VARIANT (1)..(17): Xaa = Any Amino Acid
CCEXYACNXPACTGXXA

SEQ ID NO: 9694 - protein, 15 aa, Artificial Sequence
  Synthetically generated peptide
  VARIANT (1)..(15): Xaa = Any Amino Acid
CCEXYACNPXACTGA

SEQ ID NO: 9695 - protein, 16 aa, Artificial Sequence
  Synthetically generated peptide
  VARIANT (1)..(16): Xaa = Any Amino Acid
CCEXYACNPXXACTGA

SEQ ID NO: 9696 - protein, 17 aa, Artificial Sequence
  Synthetically generated peptide
  VARIANT (1)..(17): Xaa = Any Amino Acid
CCEXYACNPXXXACTGA

SEQ ID NO: 9697 - protein, 17 aa, Artificial Sequence
  Synthetically generated peptide
  VARIANT (1)..(17): Xaa = Any Amino Acid
CCEXYACNPXXAXCTGA

SEQ ID NO: 9698 - protein, 17 aa, Artificial Sequence
  Synthetically generated peptide
  VARIANT (1)..(17): Xaa = Any Amino Acid
CCEXYACNPXXACXTGA

SEQ ID NO: 9699 - protein, 17 aa, Artificial Sequence
  Synthetically generated peptide
  VARIANT (1)..(17): Xaa = Any Amino Acid
CCEXYACNPXXACTXGA

SEQ ID NO: 9700 - protein, 17 aa, Artificial Sequence
  Synthetically generated peptide
  VARIANT (1)..(17): Xaa = Any Amino Acid
CCEXYACNPXXACTGXA

SEQ ID NO: 9701 - protein, 16 aa, Artificial Sequence
  Synthetically generated peptide
  VARIANT (1)..(16): Xaa = Any Amino Acid
CCEXYACNPXAXCTGA

SEQ ID NO: 9702 - protein, 17 aa, Artificial Sequence
  Synthetically generated peptide
  VARIANT (1)..(17): Xaa = Any Amino Acid
CCEXYACNPXAXXCTGA

SEQ ID NO: 9703 - protein, 17 aa, Artificial Sequence
  Synthetically generated peptide
  VARIANT (1)..(17): Xaa = Any Amino Acid
CCEXYACNPXAXCXTGA

SEQ ID NO: 9704 - protein, 17 aa, Artificial Sequence
  Synthetically generated peptide
  VARIANT (1)..(17): Xaa = Any Amino Acid
CCEXYACNPXAXCTXGA

SEQ ID NO: 9705 - protein, 17 aa, Artificial Sequence
  Synthetically generated peptide
  VARIANT (1)..(17): Xaa = Any Amino Acid
CCEXYACNPXAXCTGXA

SEQ ID NO: 9706 - protein, 16 aa, Artificial Sequence
  Synthetically generated peptide
  VARIANT (1)..(16): Xaa = Any Amino Acid
CCEXYACNPXACXTGA

SEQ ID NO: 9707 - protein, 17 aa, Artificial Sequence
  Synthetically generated peptide
  VARIANT (1)..(17): Xaa = Any Amino Acid
CCEXYACNPXACXXTGA

SEQ ID NO: 9708 - protein, 17 aa, Artificial Sequence
  Synthetically generated peptide
  VARIANT (1)..(17): Xaa = Any Amino Acid
CCEXYACNPXACXTXGA

SEQ ID NO: 9709 - protein, 17 aa, Artificial Sequence
  Synthetically generated peptide
  VARIANT (1)..(17): Xaa = Any Amino Acid
CCEXYACNPXACXTGXA

SEQ ID NO: 9710 - protein, 16 aa, Artificial Sequence
  Synthetically generated peptide
  VARIANT (1)..(16): Xaa = Any Amino Acid
CCEXYACNPXACTXGA

SEQ ID NO: 9711 - protein, 17 aa, Artificial Sequence
  Synthetically generated peptide
  VARIANT (1)..(17): Xaa = Any Amino Acid
CCEXYACNPXACTXXGA

SEQ ID NO: 9712 - protein, 17 aa, Artificial Sequence
  Synthetically generated peptide
  VARIANT (1)..(17): Xaa = Any Amino Acid
CCEXYACNPXACTXGXA

SEQ ID NO: 9713 - protein, 16 aa, Artificial Sequence
  Synthetically generated peptide
  VARIANT (1)..(16): Xaa = Any Amino Acid
CCEXYACNPXACTGXA

SEQ ID NO: 9714 - protein, 17 aa, Artificial Sequence
  Synthetically generated peptide
  VARIANT (1)..(17): Xaa = Any Amino Acid
CCEXYACNPXACTGXXA

SEQ ID NO: 9715 - protein, 15 aa, Artificial Sequence
  Synthetically generated peptide
  VARIANT (1)..(15): Xaa = Any Amino Acid
CCEXYACNPAXCTGA

SEQ ID NO: 9716 - protein, 16 aa, Artificial Sequence
  Synthetically generated peptide
  VARIANT (1)..(16): Xaa = Any Amino Acid
CCEXYACNPAXXCTGA

SEQ ID NO: 9717 - protein, 17 aa, Artificial Sequence
  Synthetically generated peptide
  VARIANT (1)..(17): Xaa = Any Amino Acid
CCEXYACNPAXXXCTGA

SEQ ID NO: 9718 - protein, 17 aa, Artificial Sequence
  Synthetically generated peptide
  VARIANT (1)..(17): Xaa = Any Amino Acid
CCEXYACNPAXXCXTGA

SEQ ID NO: 9719 - protein, 17 aa, Artificial Sequence
  Synthetically generated peptide
  VARIANT (1)..(17): Xaa = Any Amino Acid
CCEXYACNPAXXCTXGA

SEQ ID NO: 9720 - protein, 17 aa, Artificial Sequence
  Synthetically generated peptide
  VARIANT (1)..(17): Xaa = Any Amino Acid
CCEXYACNPAXXCTGXA

SEQ ID NO: 9721 - protein, 16 aa, Artificial Sequence
  Synthetically generated peptide
  VARIANT (1)..(16): Xaa = Any Amino Acid
CCEXYACNPAXCXTGA

SEQ ID NO: 9722 - protein, 17 aa, Artificial Sequence
  Synthetically generated peptide
  VARIANT (1)..(17): Xaa = Any Amino Acid
CCEXYACNPAXCXXTGA

SEQ ID NO: 9723 - protein, 17 aa, Artificial Sequence
  Synthetically generated peptide
  VARIANT (1)..(17): Xaa = Any Amino Acid
CCEXYACNPAXCXTXGA

SEQ ID NO: 9724 - protein, 17 aa, Artificial Sequence
  Synthetically generated peptide
  VARIANT (1)..(17): Xaa = Any Amino Acid
CCEXYACNPAXCXTGXA

SEQ ID NO: 9725 - protein, 16 aa, Artificial Sequence
  Synthetically generated peptide
  VARIANT (1)..(16): Xaa = Any Amino Acid
CCEXYACNPAXCTXGA

SEQ ID NO: 9726 - protein, 17 aa, Artificial Sequence
  Synthetically generated peptide
  VARIANT (1)..(17): Xaa = Any Amino Acid
CCEXYACNPAXCTXXGA

SEQ ID NO: 9727 - protein, 17 aa, Artificial Sequence
  Synthetically generated peptide
  VARIANT (1)..(17): Xaa = Any Amino Acid
CCEXYACNPAXCTXGXA

SEQ ID NO: 9728 - protein, 16 aa, Artificial Sequence
  Synthetically generated peptide
  VARIANT (1)..(16): Xaa = Any Amino Acid
CCEXYACNPAXCTGXA

SEQ ID NO: 9729 - protein, 17 aa, Artificial Sequence
  Synthetically generated peptide
  VARIANT (1)..(17): Xaa = Any Amino Acid
CCEXYACNPAXCTGXXA

SEQ ID NO: 9730 - protein, 15 aa, Artificial Sequence
  Synthetically generated peptide
  VARIANT (1)..(15): Xaa = Any Amino Acid
CCEXYACNPACXTGA

SEQ ID NO: 9731 - protein, 16 aa, Artificial Sequence
  Synthetically generated peptide
  VARIANT (1)..(16): Xaa = Any Amino Acid
CCEXYACNPACXXTGA

SEQ ID NO: 9732 - protein, 17 aa, Artificial Sequence
  Synthetically generated peptide
  VARIANT (1)..(17): Xaa = Any Amino Acid
CCEXYACNPACXXXTGA

SEQ ID NO: 9733 - protein, 17 aa, Artificial Sequence
  Synthetically generated peptide
  VARIANT (1)..(17): Xaa = Any Amino Acid
CCEXYACNPACXXTXGA

SEQ ID NO: 9734 - protein, 17 aa, Artificial Sequence
  Synthetically generated peptide
  VARIANT (1)..(17): Xaa = Any Amino Acid
CCEXYACNPACXXTGXA

SEQ ID NO: 9735 - protein, 16 aa, Artificial Sequence
  Synthetically generated peptide
  VARIANT (1)..(16): Xaa = Any Amino Acid
CCEXYACNPACXTXGA

SEQ ID NO: 9736 - protein, 17 aa, Artificial Sequence
  Synthetically generated peptide
  VARIANT (1)..(17): Xaa = Any Amino Acid
CCEXYACNPACXTXXGA

SEQ ID NO: 9737 - protein, 17 aa, Artificial Sequence
  Synthetically generated peptide
  VARIANT (1)..(17): Xaa = Any Amino Acid
CCEXYACNPACXTXGXA

SEQ ID NO: 9738 - protein, 16 aa, Artificial Sequence
  Synthetically generated peptide
  VARIANT (1)..(16): Xaa = Any Amino Acid
CCEXYACNPACXTGXA

SEQ ID NO: 9739 - protein, 17 aa, Artificial Sequence
  Synthetically generated peptide
  VARIANT (1)..(17): Xaa = Any Amino Acid
CCEXYACNPACXTGXXA

SEQ ID NO: 9740 - protein, 15 aa, Artificial Sequence
  Synthetically generated peptide
  VARIANT (1)..(15): Xaa = Any Amino Acid
CCEXYACNPACTXGA

SEQ ID NO: 9741 - protein, 16 aa, Artificial Sequence
  Synthetically generated peptide
  VARIANT (1)..(16): Xaa = Any Amino Acid
CCEXYACNPACTXXGA

SEQ ID NO: 9742 - protein, 17 aa, Artificial Sequence
  Synthetically generated peptide
  VARIANT (1)..(17): Xaa = Any Amino Acid
CCEXYACNPACTXXXGA

SEQ ID NO: 9743 - protein, 17 aa, Artificial Sequence
  Synthetically generated peptide
  VARIANT (1)..(17): Xaa = Any Amino Acid
CCEXYACNPACTXXGXA

SEQ ID NO: 9744 - protein, 16 aa, Artificial Sequence
  Synthetically generated peptide
  VARIANT (1)..(16): Xaa = Any Amino Acid
CCEXYACNPACTXGXA

SEQ ID NO: 9745 - protein, 17 aa, Artificial Sequence
  Synthetically generated peptide
  VARIANT (1)..(17): Xaa = Any Amino Acid
CCEXYACNPACTXGXXA

SEQ ID NO: 9746 - protein, 15 aa, Artificial Sequence
  Synthetically generated peptide
  VARIANT (1)..(15): Xaa = Any Amino Acid
CCEXYACNPACTGXA

SEQ ID NO: 9747 - protein, 16 aa, Artificial Sequence
  Synthetically generated peptide
  VARIANT (1)..(16): Xaa = Any Amino Acid
CCEXYACNPACTGXXA

SEQ ID NO: 9748 - protein, 17 aa, Artificial Sequence
  Synthetically generated peptide
  VARIANT (1)..(17): Xaa = Any Amino Acid
CCEXYACNPACTGXXXA

SEQ ID NO: 9749 - protein, 14 aa, Artificial Sequence
  Synthetically generated peptide
  VARIANT (1)..(14): Xaa = Any Amino Acid
CCEYXACNPACTGA

SEQ ID NO: 9750 - protein, 15 aa, Artificial Sequence
  Synthetically generated peptide
  VARIANT (1)..(15): Xaa = Any Amino Acid
CCEYXXACNPACTGA

SEQ ID NO: 9751 - protein, 16 aa, Artificial Sequence
  Synthetically generated peptide
  VARIANT (1)..(16): Xaa = Any Amino Acid
CCEYXXXACNPACTGA

SEQ ID NO: 9752 - protein, 17 aa, Artificial Sequence
  Synthetically generated peptide
  VARIANT (1)..(17): Xaa = Any Amino Acid
CCEYXXXXACNPACTGA

SEQ ID NO: 9753 - protein, 17 aa, Artificial Sequence
  Synthetically generated peptide
  VARIANT (1)..(17): Xaa = Any Amino Acid
CCEYXXXACXNPACTGA

SEQ ID NO: 9754 - protein, 17 aa, Artificial Sequence
  Synthetically generated peptide
  VARIANT (1)..(17): Xaa = Any Amino Acid
CCEYXXXACNXPACTGA

SEQ ID NO: 9755 - protein, 17 aa, Artificial Sequence
  Synthetically generated peptide
  VARIANT (1)..(17): Xaa = Any Amino Acid
CCEYXXXACNPXACTGA

SEQ ID NO: 9756 - protein, 17 aa, Artificial Sequence
  Synthetically generated peptide
  VARIANT (1)..(17): Xaa = Any Amino Acid
CCEYXXXACNPAXCTGA

SEQ ID NO: 9757 - protein, 17 aa, Artificial Sequence
  Synthetically generated peptide
  VARIANT (1)..(17): Xaa = Any Amino Acid
CCEYXXXACNPACXTGA

SEQ ID NO: 9758 - protein, 17 aa, Artificial Sequence
  Synthetically generated peptide
  VARIANT (1)..(17): Xaa = Any Amino Acid
CCEYXXXACNPACTXGA

SEQ ID NO: 9759 - protein, 17 aa, Artificial Sequence
  Synthetically generated peptide
  VARIANT (1)..(17): Xaa = Any Amino Acid
CCEYXXXACNPACTGXA

SEQ ID NO: 9760 - protein, 16 aa, Artificial Sequence
  Synthetically generated peptide
  VARIANT (1)..(16): Xaa = Any Amino Acid
CCEYXXACXNPACTGA

SEQ ID NO: 9761 - protein, 17 aa, Artificial Sequence
  Synthetically generated peptide
  VARIANT (1)..(17): Xaa = Any Amino Acid
CCEYXXACXXNPACTGA

SEQ ID NO: 9762 - protein, 17 aa, Artificial Sequence
  Synthetically generated peptide
  VARIANT (1)..(17): Xaa = Any Amino Acid
CCEYXXACXNXPACTGA

SEQ ID NO: 9763 - protein, 17 aa, Artificial Sequence
  Synthetically generated peptide
  VARIANT (1)..(17): Xaa = Any Amino Acid
CCEYXXACXNPXACTGA

SEQ ID NO: 9764 - protein, 17 aa, Artificial Sequence
  Synthetically generated peptide
  VARIANT (1)..(17): Xaa = Any Amino Acid
CCEYXXACXNPAXCTGA

SEQ ID NO: 9765 - protein, 17 aa, Artificial Sequence
  Synthetically generated peptide
  VARIANT (1)..(17): Xaa = Any Amino Acid
CCEYXXACXNPACXTGA

SEQ ID NO: 9766 - protein, 17 aa, Artificial Sequence
  Synthetically generated peptide
  VARIANT (1)..(17): Xaa = Any Amino Acid
CCEYXXACXNPACTXGA

SEQ ID NO: 9767 - protein, 17 aa, Artificial Sequence
  Synthetically generated peptide
  VARIANT (1)..(17): Xaa = Any Amino Acid
CCEYXXACXNPACTGXA

SEQ ID NO: 9768 - protein, 16 aa, Artificial Sequence
  Synthetically generated peptide
  VARIANT (1)..(16): Xaa = Any Amino Acid
CCEYXXACNXPACTGA

SEQ ID NO: 9769 - protein, 17 aa, Artificial Sequence
  Synthetically generated peptide
  VARIANT (1)..(17): Xaa = Any Amino Acid
CCEYXXACNXXPACTGA

SEQ ID NO: 9770 - protein, 17 aa, Artificial Sequence
  Synthetically generated peptide
  VARIANT (1)..(17): Xaa = Any Amino Acid
CCEYXXACNXPXACTGA

SEQ ID NO: 9771 - protein, 17 aa, Artificial Sequence
  Synthetically generated peptide
  VARIANT (1)..(17): Xaa = Any Amino Acid
CCEYXXACNXPAXCTGA

SEQ ID NO: 9772 - protein, 17 aa, Artificial Sequence
  Synthetically generated peptide
  VARIANT (1)..(17): Xaa = Any Amino Acid
CCEYXXACNXPACXTGA

SEQ ID NO: 9773 - protein, 17 aa, Artificial Sequence
  Synthetically generated peptide
  VARIANT (1)..(17): Xaa = Any Amino Acid
CCEYXXACNXPACTXGA

SEQ ID NO: 9774 - protein, 17 aa, Artificial Sequence
  Synthetically generated peptide
  VARIANT (1)..(17): Xaa = Any Amino Acid
CCEYXXACNXPACTGXA

SEQ ID NO: 9775 - protein, 16 aa, Artificial Sequence
  Synthetically generated peptide
  VARIANT (1)..(16): Xaa = Any Amino Acid
CCEYXXACNPXACTGA

SEQ ID NO: 9776 - protein, 17 aa, Artificial Sequence
  Synthetically generated peptide
  VARIANT (1)..(17): Xaa = Any Amino Acid
CCEYXXACNPXXACTGA

SEQ ID NO: 9777 - protein, 17 aa, Artificial Sequence
  Synthetically generated peptide
  VARIANT (1)..(17): Xaa = Any Amino Acid
CCEYXXACNPXAXCTGA

SEQ ID NO: 9778 - protein, 17 aa, Artificial Sequence
  Synthetically generated peptide
  VARIANT (1)..(17): Xaa = Any Amino Acid
CCEYXXACNPXACXTGA

SEQ ID NO: 9779 - protein, 17 aa, Artificial Sequence
  Synthetically generated peptide
  VARIANT (1)..(17): Xaa = Any Amino Acid
CCEYXXACNPXACTXGA

SEQ ID NO: 9780 - protein, 17 aa, Artificial Sequence
  Synthetically generated peptide
  VARIANT (1)..(17): Xaa = Any Amino Acid
CCEYXXACNPXACTGXA

SEQ ID NO: 9781 - protein, 16 aa, Artificial Sequence
  Synthetically generated peptide
  VARIANT (1)..(16): Xaa = Any Amino Acid
CCEYXXACNPAXCTGA

SEQ ID NO: 9782 - protein, 17 aa, Artificial Sequence
  Synthetically generated peptide
  VARIANT (1)..(17): Xaa = Any Amino Acid
CCEYXXACNPAXXCTGA

SEQ ID NO: 9783 - protein, 17 aa, Artificial Sequence
  Synthetically generated peptide
  VARIANT (1)..(17): Xaa = Any Amino Acid
CCEYXXACNPAXCXTGA

SEQ ID NO: 9784 - protein, 17 aa, Artificial Sequence
  Synthetically generated peptide
  VARIANT (1)..(17): Xaa = Any Amino Acid
CCEYXXACNPAXCTXGA

SEQ ID NO: 9785 - protein, 17 aa, Artificial Sequence
  Synthetically generated peptide
  VARIANT (1)..(17): Xaa = Any Amino Acid
CCEYXXACNPAXCTGXA

SEQ ID NO: 9786 - protein, 16 aa, Artificial Sequence
  Synthetically generated peptide
  VARIANT (1)..(16): Xaa = Any Amino Acid
CCEYXXACNPACXTGA

SEQ ID NO: 9787 - protein, 17 aa, Artificial Sequence
  Synthetically generated peptide
  VARIANT (1)..(17): Xaa = Any Amino Acid
CCEYXXACNPACXXTGA

SEQ ID NO: 9788 - protein, 17 aa, Artificial Sequence
  Synthetically generated peptide
  VARIANT (1)..(17): Xaa = Any Amino Acid
CCEYXXACNPACXTXGA

SEQ ID NO: 9789 - protein, 17 aa, Artificial Sequence
  Synthetically generated peptide
  VARIANT (1)..(17): Xaa = Any Amino Acid
CCEYXXACNPACXTGXA

SEQ ID NO: 9790 - protein, 16 aa, Artificial Sequence
  Synthetically generated peptide
  VARIANT (1)..(16): Xaa = Any Amino Acid
CCEYXXACNPACTXGA

SEQ ID NO: 9791 - protein, 17 aa, Artificial Sequence
  Synthetically generated peptide
  VARIANT (1)..(17): Xaa = Any Amino Acid
CCEYXXACNPACTXXGA

SEQ ID NO: 9792 - protein, 17 aa, Artificial Sequence
  Synthetically generated peptide
  VARIANT (1)..(17): Xaa = Any Amino Acid
CCEYXXACNPACTXGXA

SEQ ID NO: 9793 - protein, 16 aa, Artificial Sequence
  Synthetically generated peptide
  VARIANT (1)..(16): Xaa = Any Amino Acid
CCEYXXACNPACTGXA

SEQ ID NO: 9794 - protein, 17 aa, Artificial Sequence
  Synthetically generated peptide
  VARIANT (1)..(17): Xaa = Any Amino Acid
CCEYXXACNPACTGXXA

SEQ ID NO: 9795 - protein, 15 aa, Artificial Sequence
  Synthetically generated peptide
  VARIANT (1)..(15): Xaa = Any Amino Acid
CCEYXACXNPACTGA

SEQ ID NO: 9796 - protein, 16 aa, Artificial Sequence
  Synthetically generated peptide
  VARIANT (1)..(16): Xaa = Any Amino Acid
CCEYXACXXNPACTGA

SEQ ID NO: 9797 - protein, 17 aa, Artificial Sequence
  Synthetically generated peptide
  VARIANT (1)..(17): Xaa = Any Amino Acid
CCEYXACXXXNPACTGA

SEQ ID NO: 9798 - protein, 17 aa, Artificial Sequence
  Synthetically generated peptide
  VARIANT (1)..(17): Xaa = Any Amino Acid
CCEYXACXXNXPACTGA

SEQ ID NO: 9799 - protein, 17 aa, Artificial Sequence
  Synthetically generated peptide
  VARIANT (1)..(17): Xaa = Any Amino Acid
CCEYXACXXNPXACTGA

SEQ ID NO: 9800 - protein, 17 aa, Artificial Sequence
  Synthetically generated peptide
  VARIANT (1)..(17): Xaa = Any Amino Acid
CCEYXACXXNPAXCTGA

SEQ ID NO: 9801 - protein, 17 aa, Artificial Sequence
  Synthetically generated peptide
  VARIANT (1)..(17): Xaa = Any Amino Acid
CCEYXACXXNPACXTGA

SEQ ID NO: 9802 - protein, 17 aa, Artificial Sequence
  Synthetically generated peptide
  VARIANT (1)..(17): Xaa = Any Amino Acid
CCEYXACXXNPACTXGA

SEQ ID NO: 9803 - protein, 17 aa, Artificial Sequence
  Synthetically generated peptide
  VARIANT (1)..(17): Xaa = Any Amino Acid
CCEYXACXXNPACTGXA

SEQ ID NO: 9804 - protein, 16 aa, Artificial Sequence
  Synthetically generated peptide
  VARIANT (1)..(16): Xaa = Any Amino Acid
CCEYXACXNXPACTGA

SEQ ID NO: 9805 - protein, 17 aa, Artificial Sequence
  Synthetically generated peptide
  VARIANT (1)..(17): Xaa = Any Amino Acid
CCEYXACXNXXPACTGA

SEQ ID NO: 9806 - protein, 17 aa, Artificial Sequence
  Synthetically generated peptide
  VARIANT (1)..(17): Xaa = Any Amino Acid
CCEYXACXNXPXACTGA

SEQ ID NO: 9807 - protein, 17 aa, Artificial Sequence
  Synthetically generated peptide
  VARIANT (1)..(17): Xaa = Any Amino Acid
CCEYXACXNXPAXCTGA

SEQ ID NO: 9808 - protein, 17 aa, Artificial Sequence
  Synthetically generated peptide
  VARIANT (1)..(17): Xaa = Any Amino Acid
CCEYXACXNXPACXTGA

SEQ ID NO: 9809 - protein, 17 aa, Artificial Sequence
  Synthetically generated peptide
  VARIANT (1)..(17): Xaa = Any Amino Acid
CCEYXACXNXPACTXGA

SEQ ID NO: 9810 - protein, 17 aa, Artificial Sequence
  Synthetically generated peptide
  VARIANT (1)..(17): Xaa = Any Amino Acid
CCEYXACXNXPACTGXA

SEQ ID NO: 9811 - protein, 16 aa, Artificial Sequence
  Synthetically generated peptide
  VARIANT (1)..(16): Xaa = Any Amino Acid
CCEYXACXNPXACTGA

SEQ ID NO: 9812 - protein, 17 aa, Artificial Sequence
  Synthetically generated peptide
  VARIANT (1)..(17): Xaa = Any Amino Acid
CCEYXACXNPXXACTGA

SEQ ID NO: 9813 - protein, 17 aa, Artificial Sequence
  Synthetically generated peptide
  VARIANT (1)..(17): Xaa = Any Amino Acid
CCEYXACXNPXAXCTGA

SEQ ID NO: 9814 - protein, 17 aa, Artificial Sequence
  Synthetically generated peptide
  VARIANT (1)..(17): Xaa = Any Amino Acid
CCEYXACXNPXACXTGA

SEQ ID NO: 9815 - protein, 17 aa, Artificial Sequence
  Synthetically generated peptide
  VARIANT (1)..(17): Xaa = Any Amino Acid
CCEYXACXNPXACTXGA

SEQ ID NO: 9816 - protein, 17 aa, Artificial Sequence
  Synthetically generated peptide
  VARIANT (1)..(17): Xaa = Any Amino Acid
CCEYXACXNPXACTGXA

SEQ ID NO: 9817 - protein, 16 aa, Artificial Sequence
  Synthetically generated peptide
  VARIANT (1)..(16): Xaa = Any Amino Acid
CCEYXACXNPAXCTGA

SEQ ID NO: 9818 - protein, 17 aa, Artificial Sequence
  Synthetically generated peptide
  VARIANT (1)..(17): Xaa = Any Amino Acid
CCEYXACXNPAXXCTGA

SEQ ID NO: 9819 - protein, 17 aa, Artificial Sequence
  Synthetically generated peptide
  VARIANT (1)..(17): Xaa = Any Amino Acid
CCEYXACXNPAXCXTGA

SEQ ID NO: 9820 - protein, 17 aa, Artificial Sequence
  Synthetically generated peptide
  VARIANT (1)..(17): Xaa = Any Amino Acid
CCEYXACXNPAXCTXGA

SEQ ID NO: 9821 - protein, 17 aa, Artificial Sequence
  Synthetically generated peptide
  VARIANT (1)..(17): Xaa = Any Amino Acid
CCEYXACXNPAXCTGXA

SEQ ID NO: 9822 - protein, 16 aa, Artificial Sequence
  Synthetically generated peptide
  VARIANT (1)..(16): Xaa = Any Amino Acid
CCEYXACXNPACXTGA

SEQ ID NO: 9823 - protein, 17 aa, Artificial Sequence
  Synthetically generated peptide
  VARIANT (1)..(17): Xaa = Any Amino Acid
CCEYXACXNPACXXTGA

SEQ ID NO: 9824 - protein, 17 aa, Artificial Sequence
  Synthetically generated peptide
  VARIANT (1)..(17): Xaa = Any Amino Acid
CCEYXACXNPACXTXGA

SEQ ID NO: 9825 - protein, 17 aa, Artificial Sequence
  Synthetically generated peptide
  VARIANT (1)..(17): Xaa = Any Amino Acid
CCEYXACXNPACXTGXA

SEQ ID NO: 9826 - protein, 16 aa, Artificial Sequence
  Synthetically generated peptide
  VARIANT (1)..(16): Xaa = Any Amino Acid
CCEYXACXNPACTXGA

SEQ ID NO: 9827 - protein, 17 aa, Artificial Sequence
  Synthetically generated peptide
  VARIANT (1)..(17): Xaa = Any Amino Acid
CCEYXACXNPACTXXGA

SEQ ID NO: 9828 - protein, 17 aa, Artificial Sequence
  Synthetically generated peptide
  VARIANT (1)..(17): Xaa = Any Amino Acid
CCEYXACXNPACTXGXA

SEQ ID NO: 9829 - protein, 16 aa, Artificial Sequence
  Synthetically generated peptide
  VARIANT (1)..(16): Xaa = Any Amino Acid
CCEYXACXNPACTGXA

SEQ ID NO: 9830 - protein, 17 aa, Artificial Sequence
  Synthetically generated peptide
  VARIANT (1)..(17): Xaa = Any Amino Acid
CCEYXACXNPACTGXXA

SEQ ID NO: 9831 - protein, 15 aa, Artificial Sequence
  Synthetically generated peptide
  VARIANT (1)..(15): Xaa = Any Amino Acid
CCEYXACNXPACTGA

SEQ ID NO: 9832 - protein, 16 aa, Artificial Sequence
  Synthetically generated peptide
  VARIANT (1)..(16): Xaa = Any Amino Acid
CCEYXACNXXPACTGA

SEQ ID NO: 9833 - protein, 17 aa, Artificial Sequence
  Synthetically generated peptide
  VARIANT (1)..(17): Xaa = Any Amino Acid
CCEYXACNXXXPACTGA

SEQ ID NO: 9834 - protein, 17 aa, Artificial Sequence
  Synthetically generated peptide
  VARIANT (1)..(17): Xaa = Any Amino Acid
CCEYXACNXXPXACTGA

SEQ ID NO: 9835 - protein, 17 aa, Artificial Sequence
  Synthetically generated peptide
  VARIANT (1)..(17): Xaa = Any Amino Acid
CCEYXACNXXPAXCTGA

SEQ ID NO: 9836 - protein, 17 aa, Artificial Sequence
  Synthetically generated peptide
  VARIANT (1)..(17): Xaa = Any Amino Acid
CCEYXACNXXPACXTGA

SEQ ID NO: 9837 - protein, 17 aa, Artificial Sequence
  Synthetically generated peptide
  VARIANT (1)..(17): Xaa = Any Amino Acid
CCEYXACNXXPACTXGA

SEQ ID NO: 9838 - protein, 17 aa, Artificial Sequence
  Synthetically generated peptide
  VARIANT (1)..(17): Xaa = Any Amino Acid
CCEYXACNXXPACTGXA

SEQ ID NO: 9839 - protein, 16 aa, Artificial Sequence
  Synthetically generated peptide
  VARIANT (1)..(16): Xaa = Any Amino Acid
CCEYXACNXPXACTGA

SEQ ID NO: 9840 - protein, 17 aa, Artificial Sequence
  Synthetically generated peptide
  VARIANT (1)..(17): Xaa = Any Amino Acid
CCEYXACNXPXXACTGA

SEQ ID NO: 9841 - protein, 17 aa, Artificial Sequence
  Synthetically generated peptide
  VARIANT (1)..(17): Xaa = Any Amino Acid
CCEYXACNXPXAXCTGA

SEQ ID NO: 9842 - protein, 17 aa, Artificial Sequence
  Synthetically generated peptide
  VARIANT (1)..(17): Xaa = Any Amino Acid
CCEYXACNXPXACXTGA

SEQ ID NO: 9843 - protein, 17 aa, Artificial Sequence
  Synthetically generated peptide
  VARIANT (1)..(17): Xaa = Any Amino Acid
CCEYXACNXPXACTXGA

SEQ ID NO: 9844 - protein, 17 aa, Artificial Sequence
  Synthetically generated peptide
  VARIANT (1)..(17): Xaa = Any Amino Acid
CCEYXACNXPXACTGXA

SEQ ID NO: 9845 - protein, 16 aa, Artificial Sequence
  Synthetically generated peptide
  VARIANT (1)..(16): Xaa = Any Amino Acid
CCEYXACNXPAXCTGA

SEQ ID NO: 9846 - protein, 17 aa, Artificial Sequence
  Synthetically generated peptide
  VARIANT (1)..(17): Xaa = Any Amino Acid
CCEYXACNXPAXXCTGA

SEQ ID NO: 9847 - protein, 17 aa, Artificial Sequence
  Synthetically generated peptide
  VARIANT (1)..(17): Xaa = Any Amino Acid
CCEYXACNXPAXCXTGA

SEQ ID NO: 9848 - protein, 17 aa, Artificial Sequence
  Synthetically generated peptide
  VARIANT (1)..(17): Xaa = Any Amino Acid
CCEYXACNXPAXCTXGA

SEQ ID NO: 9849 - protein, 17 aa, Artificial Sequence
  Synthetically generated peptide
  VARIANT (1)..(17): Xaa = Any Amino Acid
CCEYXACNXPAXCTGXA

SEQ ID NO: 9850 - protein, 16 aa, Artificial Sequence
  Synthetically generated peptide
  VARIANT (1)..(16): Xaa = Any Amino Acid
CCEYXACNXPACXTGA

SEQ ID NO: 9851 - protein, 17 aa, Artificial Sequence
  Synthetically generated peptide
  VARIANT (1)..(17): Xaa = Any Amino Acid
CCEYXACNXPACXXTGA

SEQ ID NO: 9852 - protein, 17 aa, Artificial Sequence
  Synthetically generated peptide
  VARIANT (1)..(17): Xaa = Any Amino Acid
CCEYXACNXPACXTXGA

SEQ ID NO: 9853 - protein, 17 aa, Artificial Sequence
  Synthetically generated peptide
  VARIANT (1)..(17): Xaa = Any Amino Acid
CCEYXACNXPACXTGXA

SEQ ID NO: 9854 - protein, 16 aa, Artificial Sequence
  Synthetically generated peptide
  VARIANT (1)..(16): Xaa = Any Amino Acid
CCEYXACNXPACTXGA

SEQ ID NO: 9855 - protein, 17 aa, Artificial Sequence
  Synthetically generated peptide
  VARIANT (1)..(17): Xaa = Any Amino Acid
CCEYXACNXPACTXXGA

SEQ ID NO: 9856 - protein, 17 aa, Artificial Sequence
  Synthetically generated peptide
  VARIANT (1)..(17): Xaa = Any Amino Acid
CCEYXACNXPACTXGXA

SEQ ID NO: 9857 - protein, 16 aa, Artificial Sequence
  Synthetically generated peptide
  VARIANT (1)..(16): Xaa = Any Amino Acid
CCEYXACNXPACTGXA

SEQ ID NO: 9858 - protein, 17 aa, Artificial Sequence
  Synthetically generated peptide
  VARIANT (1)..(17): Xaa = Any Amino Acid
CCEYXACNXPACTGXXA

SEQ ID NO: 9859 - protein, 15 aa, Artificial Sequence
  Synthetically generated peptide
  VARIANT (1)..(15): Xaa = Any Amino Acid
CCEYXACNPXACTGA

SEQ ID NO: 9860 - protein, 16 aa, Artificial Sequence
  Synthetically generated peptide
  VARIANT (1)..(16): Xaa = Any Amino Acid
CCEYXACNPXXACTGA

SEQ ID NO: 9861 - protein, 17 aa, Artificial Sequence
  Synthetically generated peptide
  VARIANT (1)..(17): Xaa = Any Amino Acid
CCEYXACNPXXXACTGA

SEQ ID NO: 9862 - protein, 17 aa, Artificial Sequence
  Synthetically generated peptide
  VARIANT (1)..(17): Xaa = Any Amino Acid
CCEYXACNPXXAXCTGA

SEQ ID NO: 9863 - protein, 17 aa, Artificial Sequence
  Synthetically generated peptide
  VARIANT (1)..(17): Xaa = Any Amino Acid
CCEYXACNPXXACXTGA

SEQ ID NO: 9864 - protein, 17 aa, Artificial Sequence
  Synthetically generated peptide
  VARIANT (1)..(17): Xaa = Any Amino Acid
CCEYXACNPXXACTXGA

SEQ ID NO: 9865 - protein, 17 aa, Artificial Sequence
  Synthetically generated peptide
  VARIANT (1)..(17): Xaa = Any Amino Acid
CCEYXACNPXXACTGXA

SEQ ID NO: 9866 - protein, 16 aa, Artificial Sequence
  Synthetically generated peptide
  VARIANT (1)..(16): Xaa = Any Amino Acid
CCEYXACNPXAXCTGA

SEQ ID NO: 9867 - protein, 17 aa, Artificial Sequence
  Synthetically generated peptide
  VARIANT (1)..(17): Xaa = Any Amino Acid
CCEYXACNPXAXXCTGA

SEQ ID NO: 9868 - protein, 17 aa, Artificial Sequence
  Synthetically generated peptide
  VARIANT (1)..(17): Xaa = Any Amino Acid
CCEYXACNPXAXCXTGA

SEQ ID NO: 9869 - protein, 17 aa, Artificial Sequence
  Synthetically generated peptide
  VARIANT (1)..(17): Xaa = Any Amino Acid
CCEYXACNPXAXCTXGA

SEQ ID NO: 9870 - protein, 17 aa, Artificial Sequence
  Synthetically generated peptide
  VARIANT (1)..(17): Xaa = Any Amino Acid
CCEYXACNPXAXCTGXA

SEQ ID NO: 9871 - protein, 16 aa, Artificial Sequence
  Synthetically generated peptide
  VARIANT (1)..(16): Xaa = Any Amino Acid
CCEYXACNPXACXTGA

SEQ ID NO: 9872 - protein, 17 aa, Artificial Sequence
  Synthetically generated peptide
  VARIANT (1)..(17): Xaa = Any Amino Acid
CCEYXACNPXACXXTGA

SEQ ID NO: 9873 - protein, 17 aa, Artificial Sequence
  Synthetically generated peptide
  VARIANT (1)..(17): Xaa = Any Amino Acid
CCEYXACNPXACXTXGA

SEQ ID NO: 9874 - protein, 17 aa, Artificial Sequence
  Synthetically generated peptide
  VARIANT (1)..(17): Xaa = Any Amino Acid
CCEYXACNPXACXTGXA

SEQ ID NO: 9875 - protein, 16 aa, Artificial Sequence
  Synthetically generated peptide
  VARIANT (1)..(16): Xaa = Any Amino Acid
CCEYXACNPXACTXGA

SEQ ID NO: 9876 - protein, 17 aa, Artificial Sequence
  Synthetically generated peptide
  VARIANT (1)..(17): Xaa = Any Amino Acid
CCEYXACNPXACTXXGA

SEQ ID NO: 9877 - protein, 17 aa, Artificial Sequence
  Synthetically generated peptide
  VARIANT (1)..(17): Xaa = Any Amino Acid
CCEYXACNPXACTXGXA

SEQ ID NO: 9878 - protein, 16 aa, Artificial Sequence
  Synthetically generated peptide
  VARIANT (1)..(16): Xaa = Any Amino Acid
CCEYXACNPXACTGXA

SEQ ID NO: 9879 - protein, 17 aa, Artificial Sequence
  Synthetically generated peptide
  VARIANT (1)..(17): Xaa = Any Amino Acid
CCEYXACNPXACTGXXA

SEQ ID NO: 9880 - protein, 15 aa, Artificial Sequence
  Synthetically generated peptide
  VARIANT (1)..(15): Xaa = Any Amino Acid
CCEYXACNPAXCTGA

SEQ ID NO: 9881 - protein, 16 aa, Artificial Sequence
  Synthetically generated peptide
  VARIANT (1)..(16): Xaa = Any Amino Acid
CCEYXACNPAXXCTGA

SEQ ID NO: 9882 - protein, 17 aa, Artificial Sequence
  Synthetically generated peptide
  VARIANT (1)..(17): Xaa = Any Amino Acid
CCEYXACNPAXXXCTGA

SEQ ID NO: 9883 - protein, 17 aa, Artificial Sequence
  Synthetically generated peptide
  VARIANT (1)..(17): Xaa = Any Amino Acid
CCEYXACNPAXXCXTGA

SEQ ID NO: 9884 - protein, 17 aa, Artificial Sequence
  Synthetically generated peptide
  VARIANT (1)..(17): Xaa = Any Amino Acid
CCEYXACNPAXXCTXGA

SEQ ID NO: 9885 - protein, 17 aa, Artificial Sequence
  Synthetically generated peptide
  VARIANT (1)..(17): Xaa = Any Amino Acid
CCEYXACNPAXXCTGXA

SEQ ID NO: 9886 - protein, 16 aa, Artificial Sequence
  Synthetically generated peptide
  VARIANT (1)..(16): Xaa = Any Amino Acid
CCEYXACNPAXCXTGA

SEQ ID NO: 9887 - protein, 17 aa, Artificial Sequence
  Synthetically generated peptide
  VARIANT (1)..(17): Xaa = Any Amino Acid
CCEYXACNPAXCXXTGA

SEQ ID NO: 9888 - protein, 17 aa, Artificial Sequence
  Synthetically generated peptide
  VARIANT (1)..(17): Xaa = Any Amino Acid
CCEYXACNPAXCXTXGA

SEQ ID NO: 9889 - protein, 17 aa, Artificial Sequence
  Synthetically generated peptide
  VARIANT (1)..(17): Xaa = Any Amino Acid
CCEYXACNPAXCXTGXA

SEQ ID NO: 9890 - protein, 16 aa, Artificial Sequence
  Synthetically generated peptide
  VARIANT (1)..(16): Xaa = Any Amino Acid
CCEYXACNPAXCTXGA

SEQ ID NO: 9891 - protein, 17 aa, Artificial Sequence
  Synthetically generated peptide
  VARIANT (1)..(17): Xaa = Any Amino Acid
CCEYXACNPAXCTXXGA

SEQ ID NO: 9892 - protein, 17 aa, Artificial Sequence
  Synthetically generated peptide
  VARIANT (1)..(17): Xaa = Any Amino Acid
CCEYXACNPAXCTXGXA

SEQ ID NO: 9893 - protein, 16 aa, Artificial Sequence
  Synthetically generated peptide
  VARIANT (1)..(16): Xaa = Any Amino Acid
CCEYXACNPAXCTGXA

SEQ ID NO: 9894 - protein, 17 aa, Artificial Sequence
  Synthetically generated peptide
  VARIANT (1)..(17): Xaa = Any Amino Acid
CCEYXACNPAXCTGXXA

SEQ ID NO: 9895 - protein, 15 aa, Artificial Sequence
  Synthetically generated peptide
  VARIANT (1)..(15): Xaa = Any Amino Acid
CCEYXACNPACXTGA

SEQ ID NO: 9896 - protein, 16 aa, Artificial Sequence
  Synthetically generated peptide
  VARIANT (1)..(16): Xaa = Any Amino Acid
CCEYXACNPACXXTGA

SEQ ID NO: 9897 - protein, 17 aa, Artificial Sequence
  Synthetically generated peptide
  VARIANT (1)..(17): Xaa = Any Amino Acid
CCEYXACNPACXXXTGA

SEQ ID NO: 9898 - protein, 17 aa, Artificial Sequence
  Synthetically generated peptide
  VARIANT (1)..(17): Xaa = Any Amino Acid
CCEYXACNPACXXTXGA

SEQ ID NO: 9899 - protein, 17 aa, Artificial Sequence
  Synthetically generated peptide
  VARIANT (1)..(17): Xaa = Any Amino Acid
CCEYXACNPACXXTGXA

SEQ ID NO: 9900 - protein, 16 aa, Artificial Sequence
  Synthetically generated peptide
  VARIANT (1)..(16): Xaa = Any Amino Acid
CCEYXACNPACXTXGA

SEQ ID NO: 9901 - protein, 17 aa, Artificial Sequence
  Synthetically generated peptide
  VARIANT (1)..(17): Xaa = Any Amino Acid
CCEYXACNPACXTXXGA

SEQ ID NO: 9902 - protein, 17 aa, Artificial Sequence
  Synthetically generated peptide
  VARIANT (1)..(17): Xaa = Any Amino Acid
CCEYXACNPACXTXGXA

SEQ ID NO: 9903 - protein, 16 aa, Artificial Sequence
  Synthetically generated peptide
  VARIANT (1)..(16): Xaa = Any Amino Acid
CCEYXACNPACXTGXA

SEQ ID NO: 9904 - protein, 17 aa, Artificial Sequence
  Synthetically generated peptide
  VARIANT (1)..(17): Xaa = Any Amino Acid
CCEYXACNPACXTGXXA

SEQ ID NO: 9905 - protein, 15 aa, Artificial Sequence
  Synthetically generated peptide
  VARIANT (1)..(15): Xaa = Any Amino Acid
CCEYXACNPACTXGA

SEQ ID NO: 9906 - protein, 16 aa, Artificial Sequence
  Synthetically generated peptide
  VARIANT (1)..(16): Xaa = Any Amino Acid
CCEYXACNPACTXXGA

SEQ ID NO: 9907 - protein, 17 aa, Artificial Sequence
  Synthetically generated peptide
  VARIANT (1)..(17): Xaa = Any Amino Acid
CCEYXACNPACTXXXGA

SEQ ID NO: 9908 - protein, 17 aa, Artificial Sequence
  Synthetically generated peptide
  VARIANT (1)..(17): Xaa = Any Amino Acid
CCEYXACNPACTXXGXA

SEQ ID NO: 9909 - protein, 16 aa, Artificial Sequence
  Synthetically generated peptide
  VARIANT (1)..(16): Xaa = Any Amino Acid
CCEYXACNPACTXGXA

SEQ ID NO: 9910 - protein, 17 aa, Artificial Sequence
  Synthetically generated peptide
  VARIANT (1)..(17): Xaa = Any Amino Acid
CCEYXACNPACTXGXXA

SEQ ID NO: 9911 - protein, 15 aa, Artificial Sequence
  Synthetically generated peptide
  VARIANT (1)..(15): Xaa = Any Amino Acid
CCEYXACNPACTGXA

SEQ ID NO: 9912 - protein, 16 aa, Artificial Sequence
  Synthetically generated peptide
  VARIANT (1)..(16): Xaa = Any Amino Acid
CCEYXACNPACTGXXA

SEQ ID NO: 9913 - protein, 17 aa, Artificial Sequence
  Synthetically generated peptide
  VARIANT (1)..(17): Xaa = Any Amino Acid
CCEYXACNPACTGXXXA

SEQ ID NO: 9914 - protein, 14 aa, Artificial Sequence
  Synthetically generated peptide
  VARIANT (1)..(14): Xaa = Any Amino Acid
CCEYACXNPACTGA

SEQ ID NO: 9915 - protein, 15 aa, Artificial Sequence
  Synthetically generated peptide
  VARIANT (1)..(15): Xaa = Any Amino Acid
CCEYACXXNPACTGA

SEQ ID NO: 9916 - protein, 16 aa, Artificial Sequence
  Synthetically generated peptide
  VARIANT (1)..(16): Xaa = Any Amino Acid
CCEYACXXXNPACTGA

SEQ ID NO: 9917 - protein, 17 aa, Artificial Sequence
  Synthetically generated peptide
  VARIANT (1)..(17): Xaa = Any Amino Acid
CCEYACXXXXNPACTGA

SEQ ID NO: 9918 - protein, 17 aa, Artificial Sequence
  Synthetically generated peptide
  VARIANT (1)..(17): Xaa = Any Amino Acid
CCEYACXXXNXPACTGA

SEQ ID NO: 9919 - protein, 17 aa, Artificial Sequence
  Synthetically generated peptide
  VARIANT (1)..(17): Xaa = Any Amino Acid
CCEYACXXXNPXACTGA

SEQ ID NO: 9920 - protein, 17 aa, Artificial Sequence
  Synthetically generated peptide
  VARIANT (1)..(17): Xaa = Any Amino Acid
CCEYACXXXNPAXCTGA

SEQ ID NO: 9921 - protein, 17 aa, Artificial Sequence
  Synthetically generated peptide
  VARIANT (1)..(17): Xaa = Any Amino Acid
CCEYACXXXNPACXTGA

SEQ ID NO: 9922 - protein, 17 aa, Artificial Sequence
  Synthetically generated peptide
  VARIANT (1)..(17): Xaa = Any Amino Acid
CCEYACXXXNPACTXGA

SEQ ID NO: 9923 - protein, 17 aa, Artificial Sequence
  Synthetically generated peptide
  VARIANT (1)..(17): Xaa = Any Amino Acid
CCEYACXXXNPACTGXA

SEQ ID NO: 9924 - protein, 16 aa, Artificial Sequence
  Synthetically generated peptide
  VARIANT (1)..(16): Xaa = Any Amino Acid
CCEYACXXNXPACTGA

SEQ ID NO: 9925 - protein, 17 aa, Artificial Sequence
  Synthetically generated peptide
  VARIANT (1)..(17): Xaa = Any Amino Acid
CCEYACXXNXXPACTGA

SEQ ID NO: 9926 - protein, 17 aa, Artificial Sequence
  Synthetically generated peptide
  VARIANT (1)..(17): Xaa = Any Amino Acid
CCEYACXXNXPXACTGA

SEQ ID NO: 9927 - protein, 17 aa, Artificial Sequence
  Synthetically generated peptide
  VARIANT (1)..(17): Xaa = Any Amino Acid
CCEYACXXNXPAXCTGA

SEQ ID NO: 9928 - protein, 17 aa, Artificial Sequence
  Synthetically generated peptide
  VARIANT (1)..(17): Xaa = Any Amino Acid
CCEYACXXNXPACXTGA

SEQ ID NO: 9929 - protein, 17 aa, Artificial Sequence
  Synthetically generated peptide
  VARIANT (1)..(17): Xaa = Any Amino Acid
CCEYACXXNXPACTXGA

SEQ ID NO: 9930 - protein, 17 aa, Artificial Sequence
  Synthetically generated peptide
  VARIANT (1)..(17): Xaa = Any Amino Acid
CCEYACXXNXPACTGXA

SEQ ID NO: 9931 - protein, 16 aa, Artificial Sequence
  Synthetically generated peptide
  VARIANT (1)..(16): Xaa = Any Amino Acid
CCEYACXXNPXACTGA

SEQ ID NO: 9932 - protein, 17 aa, Artificial Sequence
  Synthetically generated peptide
  VARIANT (1)..(17): Xaa = Any Amino Acid
CCEYACXXNPXXACTGA

SEQ ID NO: 9933 - protein, 17 aa, Artificial Sequence
  Synthetically generated peptide
  VARIANT (1)..(17): Xaa = Any Amino Acid
CCEYACXXNPXAXCTGA

SEQ ID NO: 9934 - protein, 17 aa, Artificial Sequence
  Synthetically generated peptide
  VARIANT (1)..(17): Xaa = Any Amino Acid
CCEYACXXNPXACXTGA

SEQ ID NO: 9935 - protein, 17 aa, Artificial Sequence
  Synthetically generated peptide
  VARIANT (1)..(17): Xaa = Any Amino Acid
CCEYACXXNPXACTXGA

SEQ ID NO: 9936 - protein, 17 aa, Artificial Sequence
  Synthetically generated peptide
  VARIANT (1)..(17): Xaa = Any Amino Acid
CCEYACXXNPXACTGXA

SEQ ID NO: 9937 - protein, 16 aa, Artificial Sequence
  Synthetically generated peptide
  VARIANT (1)..(16): Xaa = Any Amino Acid
CCEYACXXNPAXCTGA

SEQ ID NO: 9938 - protein, 17 aa, Artificial Sequence
  Synthetically generated peptide
  VARIANT (1)..(17): Xaa = Any Amino Acid
CCEYACXXNPAXXCTGA

SEQ ID NO: 9939 - protein, 17 aa, Artificial Sequence
  Synthetically generated peptide
  VARIANT (1)..(17): Xaa = Any Amino Acid
CCEYACXXNPAXCXTGA

SEQ ID NO: 9940 - protein, 17 aa, Artificial Sequence
  Synthetically generated peptide
  VARIANT (1)..(17): Xaa = Any Amino Acid
CCEYACXXNPAXCTXGA

SEQ ID NO: 9941 - protein, 17 aa, Artificial Sequence
  Synthetically generated peptide
  VARIANT (1)..(17): Xaa = Any Amino Acid
CCEYACXXNPAXCTGXA

SEQ ID NO: 9942 - protein, 16 aa, Artificial Sequence
  Synthetically generated peptide
  VARIANT (1)..(16): Xaa = Any Amino Acid
CCEYACXXNPACXTGA

SEQ ID NO: 9943 - protein, 17 aa, Artificial Sequence
  Synthetically generated peptide
  VARIANT (1)..(17): Xaa = Any Amino Acid
CCEYACXXNPACXXTGA

SEQ ID NO: 9944 - protein, 17 aa, Artificial Sequence
  Synthetically generated peptide
  VARIANT (1)..(17): Xaa = Any Amino Acid
CCEYACXXNPACXTXGA

SEQ ID NO: 9945 - protein, 17 aa, Artificial Sequence
  Synthetically generated peptide
  VARIANT (1)..(17): Xaa = Any Amino Acid
CCEYACXXNPACXTGXA

SEQ ID NO: 9946 - protein, 16 aa, Artificial Sequence
  Synthetically generated peptide
  VARIANT (1)..(16): Xaa = Any Amino Acid
CCEYACXXNPACTXGA

SEQ ID NO: 9947 - protein, 17 aa, Artificial Sequence
  Synthetically generated peptide
  VARIANT (1)..(17): Xaa = Any Amino Acid
CCEYACXXNPACTXXGA

SEQ ID NO: 9948 - protein, 17 aa, Artificial Sequence
  Synthetically generated peptide
  VARIANT (1)..(17): Xaa = Any Amino Acid
CCEYACXXNPACTXGXA

SEQ ID NO: 9949 - protein, 16 aa, Artificial Sequence
  Synthetically generated peptide
  VARIANT (1)..(16): Xaa = Any Amino Acid
CCEYACXXNPACTGXA

SEQ ID NO: 9950 - protein, 17 aa, Artificial Sequence
  Synthetically generated peptide
  VARIANT (1)..(17): Xaa = Any Amino Acid
CCEYACXXNPACTGXXA

SEQ ID NO: 9951 - protein, 15 aa, Artificial Sequence
  Synthetically generated peptide
  VARIANT (1)..(15): Xaa = Any Amino Acid
CCEYACXNXPACTGA

SEQ ID NO: 9952 - protein, 16 aa, Artificial Sequence
  Synthetically generated peptide
  VARIANT (1)..(16): Xaa = Any Amino Acid
CCEYACXNXXPACTGA

SEQ ID NO: 9953 - protein, 17 aa, Artificial Sequence
  Synthetically generated peptide
  VARIANT (1)..(17): Xaa = Any Amino Acid
CCEYACXNXXXPACTGA

SEQ ID NO: 9954 - protein, 17 aa, Artificial Sequence
  Synthetically generated peptide
  VARIANT (1)..(17): Xaa = Any Amino Acid
CCEYACXNXXPXACTGA

SEQ ID NO: 9955 - protein, 17 aa, Artificial Sequence
  Synthetically generated peptide
  VARIANT (1)..(17): Xaa = Any Amino Acid
CCEYACXNXXPAXCTGA

SEQ ID NO: 9956 - protein, 17 aa, Artificial Sequence
  Synthetically generated peptide
  VARIANT (1)..(17): Xaa = Any Amino Acid
CCEYACXNXXPACXTGA

SEQ ID NO: 9957 - protein, 17 aa, Artificial Sequence
  Synthetically generated peptide
  VARIANT (1)..(17): Xaa = Any Amino Acid
CCEYACXNXXPACTXGA

SEQ ID NO: 9958 - protein, 17 aa, Artificial Sequence
  Synthetically generated peptide
  VARIANT (1)..(17): Xaa = Any Amino Acid
CCEYACXNXXPACTGXA

SEQ ID NO: 9959 - protein, 16 aa, Artificial Sequence
  Synthetically generated peptide
  VARIANT (1)..(16): Xaa = Any Amino Acid
CCEYACXNXPXACTGA

SEQ ID NO: 9960 - protein, 17 aa, Artificial Sequence
  Synthetically generated peptide
  VARIANT (1)..(17): Xaa = Any Amino Acid
CCEYACXNXPXXACTGA

SEQ ID NO: 9961 - protein, 17 aa, Artificial Sequence
  Synthetically generated peptide
  VARIANT (1)..(17): Xaa = Any Amino Acid
CCEYACXNXPXAXCTGA

SEQ ID NO: 9962 - protein, 17 aa, Artificial Sequence
  Synthetically generated peptide
  VARIANT (1)..(17): Xaa = Any Amino Acid
CCEYACXNXPXACXTGA

SEQ ID NO: 9963 - protein, 17 aa, Artificial Sequence
  Synthetically generated peptide
  VARIANT (1)..(17): Xaa = Any Amino Acid
CCEYACXNXPXACTXGA

SEQ ID NO: 9964 - protein, 17 aa, Artificial Sequence
  Synthetically generated peptide
  VARIANT (1)..(17): Xaa = Any Amino Acid
CCEYACXNXPXACTGXA

SEQ ID NO: 9965 - protein, 16 aa, Artificial Sequence
  Synthetically generated peptide
  VARIANT (1)..(16): Xaa = Any Amino Acid
CCEYACXNXPAXCTGA

SEQ ID NO: 9966 - protein, 17 aa, Artificial Sequence
  Synthetically generated peptide
  VARIANT (1)..(17): Xaa = Any Amino Acid
CCEYACXNXPAXXCTGA

SEQ ID NO: 9967 - protein, 17 aa, Artificial Sequence
  Synthetically generated peptide
  VARIANT (1)..(17): Xaa = Any Amino Acid
CCEYACXNXPAXCXTGA

SEQ ID NO: 9968 - protein, 17 aa, Artificial Sequence
  Synthetically generated peptide
  VARIANT (1)..(17): Xaa = Any Amino Acid
CCEYACXNXPAXCTXGA

SEQ ID NO: 9969 - protein, 17 aa, Artificial Sequence
  Synthetically generated peptide
  VARIANT (1)..(17): Xaa = Any Amino Acid
CCEYACXNXPAXCTGXA

SEQ ID NO: 9970 - protein, 16 aa, Artificial Sequence
  Synthetically generated peptide
  VARIANT (1)..(16): Xaa = Any Amino Acid
CCEYACXNXPACXTGA

SEQ ID NO: 9971 - protein, 17 aa, Artificial Sequence
  Synthetically generated peptide
  VARIANT (1)..(17): Xaa = Any Amino Acid
CCEYACXNXPACXXTGA

SEQ ID NO: 9972 - protein, 17 aa, Artificial Sequence
  Synthetically generated peptide
  VARIANT (1)..(17): Xaa = Any Amino Acid
CCEYACXNXPACXTXGA

SEQ ID NO: 9973 - protein, 17 aa, Artificial Sequence
  Synthetically generated peptide
  VARIANT (1)..(17): Xaa = Any Amino Acid
CCEYACXNXPACXTGXA

SEQ ID NO: 9974 - protein, 16 aa, Artificial Sequence
  Synthetically generated peptide
  VARIANT (1)..(16): Xaa = Any Amino Acid
CCEYACXNXPACTXGA

SEQ ID NO: 9975 - protein, 17 aa, Artificial Sequence
  Synthetically generated peptide
  VARIANT (1)..(17): Xaa = Any Amino Acid
CCEYACXNXPACTXXGA

SEQ ID NO: 9976 - protein, 17 aa, Artificial Sequence
  Synthetically generated peptide
  VARIANT (1)..(17): Xaa = Any Amino Acid
CCEYACXNXPACTXGXA

SEQ ID NO: 9977 - protein, 16 aa, Artificial Sequence
  Synthetically generated peptide
  VARIANT (1)..(16): Xaa = Any Amino Acid
CCEYACXNXPACTGXA

SEQ ID NO: 9978 - protein, 17 aa, Artificial Sequence
  Synthetically generated peptide
  VARIANT (1)..(17): Xaa = Any Amino Acid
CCEYACXNXPACTGXXA

SEQ ID NO: 9979 - protein, 15 aa, Artificial Sequence
  Synthetically generated peptide
  VARIANT (1)..(15): Xaa = Any Amino Acid
CCEYACXNPXACTGA

SEQ ID NO: 9980 - protein, 16 aa, Artificial Sequence
  Synthetically generated peptide
  VARIANT (1)..(16): Xaa = Any Amino Acid
CCEYACXNPXXACTGA

SEQ ID NO: 9981 - protein, 17 aa, Artificial Sequence
  Synthetically generated peptide
  VARIANT (1)..(17): Xaa = Any Amino Acid
CCEYACXNPXXXACTGA

SEQ ID NO: 9982 - protein, 17 aa, Artificial Sequence
  Synthetically generated peptide
  VARIANT (1)..(17): Xaa = Any Amino Acid
CCEYACXNPXXAXCTGA

SEQ ID NO: 9983 - protein, 17 aa, Artificial Sequence
  Synthetically generated peptide
  VARIANT (1)..(17): Xaa = Any Amino Acid
CCEYACXNPXXACXTGA

SEQ ID NO: 9984 - protein, 17 aa, Artificial Sequence
  Synthetically generated peptide
  VARIANT (1)..(17): Xaa = Any Amino Acid
CCEYACXNPXXACTXGA

SEQ ID NO: 9985 - protein, 17 aa, Artificial Sequence
  Synthetically generated peptide
  VARIANT (1)..(17): Xaa = Any Amino Acid
CCEYACXNPXXACTGXA

SEQ ID NO: 9986 - protein, 16 aa, Artificial Sequence
  Synthetically generated peptide
  VARIANT (1)..(16): Xaa = Any Amino Acid
CCEYACXNPXAXCTGA

SEQ ID NO: 9987 - protein, 17 aa, Artificial Sequence
  Synthetically generated peptide
  VARIANT (1)..(17): Xaa = Any Amino Acid
CCEYACXNPXAXXCTGA

SEQ ID NO: 9988 - protein, 17 aa, Artificial Sequence
  Synthetically generated peptide
  VARIANT (1)..(17): Xaa = Any Amino Acid
CCEYACXNPXAXCXTGA

SEQ ID NO: 9989 - protein, 17 aa, Artificial Sequence
  Synthetically generated peptide
  VARIANT (1)..(17): Xaa = Any Amino Acid
CCEYACXNPXAXCTXGA

SEQ ID NO: 9990 - protein, 17 aa, Artificial Sequence
  Synthetically generated peptide
  VARIANT (1)..(17): Xaa = Any Amino Acid
CCEYACXNPXAXCTGXA

SEQ ID NO: 9991 - protein, 16 aa, Artificial Sequence
  Synthetically generated peptide
  VARIANT (1)..(16): Xaa = Any Amino Acid
CCEYACXNPXACXTGA

SEQ ID NO: 9992 - protein, 17 aa, Artificial Sequence
  Synthetically generated peptide
  VARIANT (1)..(17): Xaa = Any Amino Acid
CCEYACXNPXACXXTGA

SEQ ID NO: 9993 - protein, 17 aa, Artificial Sequence
  Synthetically generated peptide
  VARIANT (1)..(17): Xaa = Any Amino Acid
CCEYACXNPXACXTXGA

SEQ ID NO: 9994 - protein, 17 aa, Artificial Sequence
  Synthetically generated peptide
  VARIANT (1)..(17): Xaa = Any Amino Acid
CCEYACXNPXACXTGXA

SEQ ID NO: 9995 - protein, 16 aa, Artificial Sequence
  Synthetically generated peptide
  VARIANT (1)..(16): Xaa = Any Amino Acid
CCEYACXNPXACTXGA

SEQ ID NO: 9996 - protein, 17 aa, Artificial Sequence
  Synthetically generated peptide
  VARIANT (1)..(17): Xaa = Any Amino Acid
CCEYACXNPXACTXXGA

SEQ ID NO: 9997 - protein, 17 aa, Artificial Sequence
  Synthetically generated peptide
  VARIANT (1)..(17): Xaa = Any Amino Acid
CCEYACXNPXACTXGXA

SEQ ID NO: 9998 - protein, 16 aa, Artificial Sequence
  Synthetically generated peptide
  VARIANT (1)..(16): Xaa = Any Amino Acid
CCEYACXNPXACTGXA

SEQ ID NO: 9999 - protein, 17 aa, Artificial Sequence
  Synthetically generated peptide
  VARIANT (1)..(17): Xaa = Any Amino Acid
CCEYACXNPXACTGXXA

SEQ ID NO: 10000 - protein, 15 aa, Artificial Sequence
  Synthetically generated peptide
  VARIANT (1)..(15): Xaa = Any Amino Acid
CCEYACXNPAXCTGA

SEQ ID NO: 10001 - protein, 16 aa, Artificial Sequence
  Synthetically generated peptide
  VARIANT (1)..(16): Xaa = Any Amino Acid
CCEYACXNPAXXCTGA

SEQ ID NO: 10002 - protein, 17 aa, Artificial Sequence
  Synthetically generated peptide
  VARIANT (1)..(17): Xaa = Any Amino Acid
CCEYACXNPAXXXCTGA

SEQ ID NO: 10003 - protein, 17 aa, Artificial Sequence
  Synthetically generated peptide
  VARIANT (1)..(17): Xaa = Any Amino Acid
CCEYACXNPAXXCXTGA

SEQ ID NO: 10004 - protein, 17 aa, Artificial Sequence
  Synthetically generated peptide
  VARIANT (1)..(17): Xaa = Any Amino Acid
CCEYACXNPAXXCTXGA

SEQ ID NO: 10005 - protein, 17 aa, Artificial Sequence
  Synthetically generated peptide
  VARIANT (1)..(17): Xaa = Any Amino Acid
CCEYACXNPAXXCTGXA

SEQ ID NO: 10006 - protein, 16 aa, Artificial Sequence
  Synthetically generated peptide
  VARIANT (1)..(16): Xaa = Any Amino Acid
CCEYACXNPAXCXTGA

SEQ ID NO: 10007 - protein, 17 aa, Artificial Sequence
  Synthetically generated peptide
  VARIANT (1)..(17): Xaa = Any Amino Acid
CCEYACXNPAXCXXTGA

SEQ ID NO: 10008 - protein, 17 aa, Artificial Sequence
  Synthetically generated peptide
  VARIANT (1)..(17): Xaa = Any Amino Acid
CCEYACXNPAXCXTXGA

SEQ ID NO: 10009 - protein, 17 aa, Artificial Sequence
  Synthetically generated peptide
  VARIANT (1)..(17): Xaa = Any Amino Acid
CCEYACXNPAXCXTGXA

SEQ ID NO: 10010 - protein, 16 aa, Artificial Sequence
  Synthetically generated peptide
  VARIANT (1)..(16): Xaa = Any Amino Acid
CCEYACXNPAXCTXGA

SEQ ID NO: 10011 - protein, 17 aa, Artificial Sequence
  Synthetically generated peptide
  VARIANT (1)..(17): Xaa = Any Amino Acid
CCEYACXNPAXCTXXGA

SEQ ID NO: 10012 - protein, 17 aa, Artificial Sequence
  Synthetically generated peptide
  VARIANT (1)..(17): Xaa = Any Amino Acid
CCEYACXNPAXCTXGXA

SEQ ID NO: 10013 - protein, 16 aa, Artificial Sequence
  Synthetically generated peptide
  VARIANT (1)..(16): Xaa = Any Amino Acid
CCEYACXNPAXCTGXA

SEQ ID NO: 10014 - protein, 17 aa, Artificial Sequence
  Synthetically generated peptide
  VARIANT (1)..(17): Xaa = Any Amino Acid
CCEYACXNPAXCTGXXA

SEQ ID NO: 10015 - protein, 15 aa, Artificial Sequence
  Synthetically generated peptide
  VARIANT (1)..(15): Xaa = Any Amino Acid
CCEYACXNPACXTGA

SEQ ID NO: 10016 - protein, 16 aa, Artificial Sequence
  Synthetically generated peptide
  VARIANT (1)..(16): Xaa = Any Amino Acid
CCEYACXNPACXXTGA

SEQ ID NO: 10017 - protein, 17 aa, Artificial Sequence
  Synthetically generated peptide
  VARIANT (1)..(17): Xaa = Any Amino Acid
CCEYACXNPACXXXTGA

SEQ ID NO: 10018 - protein, 17 aa, Artificial Sequence
  Synthetically generated peptide
  VARIANT (1)..(17): Xaa = Any Amino Acid
CCEYACXNPACXXTXGA

SEQ ID NO: 10019 - protein, 17 aa, Artificial Sequence
  Synthetically generated peptide
  VARIANT (1)..(17): Xaa = Any Amino Acid
CCEYACXNPACXXTGXA

SEQ ID NO: 10020 - protein, 16 aa, Artificial Sequence
  Synthetically generated peptide
  VARIANT (1)..(16): Xaa = Any Amino Acid
CCEYACXNPACXTXGA

SEQ ID NO: 10021 - protein, 17 aa, Artificial Sequence
  Synthetically generated peptide
  VARIANT (1)..(17): Xaa = Any Amino Acid
CCEYACXNPACXTXXGA

SEQ ID NO: 10022 - protein, 17 aa, Artificial Sequence
  Synthetically generated peptide
  VARIANT (1)..(17): Xaa = Any Amino Acid
CCEYACXNPACXTXGXA

SEQ ID NO: 10023 - protein, 16 aa, Artificial Sequence
  Synthetically generated peptide
  VARIANT (1)..(16): Xaa = Any Amino Acid
CCEYACXNPACXTGXA

SEQ ID NO: 10024 - protein, 17 aa, Artificial Sequence
  Synthetically generated peptide
  VARIANT (1)..(17): Xaa = Any Amino Acid
CCEYACXNPACXTGXXA

SEQ ID NO: 10025 - protein, 15 aa, Artificial Sequence
  Synthetically generated peptide
  VARIANT (1)..(15): Xaa = Any Amino Acid
CCEYACXNPACTXGA

SEQ ID NO: 10026 - protein, 16 aa, Artificial Sequence
  Synthetically generated peptide
  VARIANT (1)..(16): Xaa = Any Amino Acid
CCEYACXNPACTXXGA

SEQ ID NO: 10027 - protein, 17 aa, Artificial Sequence
  Synthetically generated peptide
  VARIANT (1)..(17): Xaa = Any Amino Acid
CCEYACXNPACTXXXGA

SEQ ID NO: 10028 - protein, 17 aa, Artificial Sequence
  Synthetically generated peptide
  VARIANT (1)..(17): Xaa = Any Amino Acid
CCEYACXNPACTXXGXA

SEQ ID NO: 10029 - protein, 16 aa, Artificial Sequence
  Synthetically generated peptide
  VARIANT (1)..(16): Xaa = Any Amino Acid
CCEYACXNPACTXGXA

SEQ ID NO: 10030 - protein, 17 aa, Artificial Sequence
  Synthetically generated peptide
  VARIANT (1)..(17): Xaa = Any Amino Acid
CCEYACXNPACTXGXXA

SEQ ID NO: 10031 - protein, 15 aa, Artificial Sequence
  Synthetically generated peptide
  VARIANT (1)..(15): Xaa = Any Amino Acid
CCEYACXNPACTGXA

SEQ ID NO: 10032 - protein, 16 aa, Artificial Sequence
  Synthetically generated peptide
  VARIANT (1)..(16): Xaa = Any Amino Acid
CCEYACXNPACTGXXA

SEQ ID NO: 10033 - protein, 17 aa, Artificial Sequence
  Synthetically generated peptide
  VARIANT (1)..(17): Xaa = Any Amino Acid
CCEYACXNPACTGXXXA

SEQ ID NO: 10034 - protein, 14 aa, Artificial Sequence
  Synthetically generated peptide
  VARIANT (1)..(14): Xaa = Any Amino Acid
CCEYACNXPACTGA

SEQ ID NO: 10035 - protein, 15 aa, Artificial Sequence
  Synthetically generated peptide
  VARIANT (1)..(15): Xaa = Any Amino Acid
CCEYACNXXPACTGA

SEQ ID NO: 10036 - protein, 16 aa, Artificial Sequence
  Synthetically generated peptide
  VARIANT (1)..(16): Xaa = Any Amino Acid
CCEYACNXXXPACTGA

SEQ ID NO: 10037 - protein, 17 aa, Artificial Sequence
  Synthetically generated peptide
  VARIANT (1)..(17): Xaa = Any Amino Acid
CCEYACNXXXXPACTGA

SEQ ID NO: 10038 - protein, 17 aa, Artificial Sequence
  Synthetically generated peptide
  VARIANT (1)..(17): Xaa = Any Amino Acid
CCEYACNXXXPXACTGA

SEQ ID NO: 10039 - protein, 17 aa, Artificial Sequence
  Synthetically generated peptide
  VARIANT (1)..(17): Xaa = Any Amino Acid
CCEYACNXXXPAXCTGA

SEQ ID NO: 10040 - protein, 17 aa, Artificial Sequence
  Synthetically generated peptide
  VARIANT (1)..(17): Xaa = Any Amino Acid
CCEYACNXXXPACXTGA

SEQ ID NO: 10041 - protein, 17 aa, Artificial Sequence
  Synthetically generated peptide
  VARIANT (1)..(17): Xaa = Any Amino Acid
CCEYACNXXXPACTXGA

SEQ ID NO: 10042 - protein, 17 aa, Artificial Sequence
  Synthetically generated peptide
  VARIANT (1)..(17): Xaa = Any Amino Acid
CCEYACNXXXPACTGXA

SEQ ID NO: 10043 - protein, 16 aa, Artificial Sequence
  Synthetically generated peptide
  VARIANT (1)..(16): Xaa = Any Amino Acid
CCEYACNXXPXACTGA

SEQ ID NO: 10044 - protein, 17 aa, Artificial Sequence
  Synthetically generated peptide
  VARIANT (1)..(17): Xaa = Any Amino Acid
CCEYACNXXPXXACTGA

SEQ ID NO: 10045 - protein, 17 aa, Artificial Sequence
  Synthetically generated peptide
  VARIANT (1)..(17): Xaa = Any Amino Acid
CCEYACNXXPXAXCTGA

SEQ ID NO: 10046 - protein, 17 aa, Artificial Sequence
  Synthetically generated peptide
  VARIANT (1)..(17): Xaa = Any Amino Acid
CCEYACNXXPXACXTGA

SEQ ID NO: 10047 - protein, 17 aa, Artificial Sequence
  Synthetically generated peptide
  VARIANT (1)..(17): Xaa = Any Amino Acid
CCEYACNXXPXACTXGA

SEQ ID NO: 10048 - protein, 17 aa, Artificial Sequence
  Synthetically generated peptide
  VARIANT (1)..(17): Xaa = Any Amino Acid
CCEYACNXXPXACTGXA

SEQ ID NO: 10049 - protein, 16 aa, Artificial Sequence
  Synthetically generated peptide
  VARIANT (1)..(16): Xaa = Any Amino Acid
CCEYACNXXPAXCTGA

SEQ ID NO: 10050 - protein, 17 aa, Artificial Sequence
  Synthetically generated peptide
  VARIANT (1)..(17): Xaa = Any Amino Acid
CCEYACNXXPAXXCTGA

SEQ ID NO: 10051 - protein, 17 aa, Artificial Sequence
  Synthetically generated peptide
  VARIANT (1)..(17): Xaa = Any Amino Acid
CCEYACNXXPAXCXTGA

SEQ ID NO: 10052 - protein, 17 aa, Artificial Sequence
  Synthetically generated peptide
  VARIANT (1)..(17): Xaa = Any Amino Acid
CCEYACNXXPAXCTXGA

SEQ ID NO: 10053 - protein, 17 aa, Artificial Sequence
  Synthetically generated peptide
  VARIANT (1)..(17): Xaa = Any Amino Acid
CCEYACNXXPAXCTGXA

SEQ ID NO: 10054 - protein, 16 aa, Artificial Sequence
  Synthetically generated peptide
  VARIANT (1)..(16): Xaa = Any Amino Acid
CCEYACNXXPACXTGA

SEQ ID NO: 10055 - protein, 17 aa, Artificial Sequence
  Synthetically generated peptide
  VARIANT (1)..(17): Xaa = Any Amino Acid
CCEYACNXXPACXXTGA

SEQ ID NO: 10056 - protein, 17 aa, Artificial Sequence
  Synthetically generated peptide
  VARIANT (1)..(17): Xaa = Any Amino Acid
CCEYACNXXPACXTXGA

SEQ ID NO: 10057 - protein, 17 aa, Artificial Sequence
  Synthetically generated peptide
  VARIANT (1)..(17): Xaa = Any Amino Acid
CCEYACNXXPACXTGXA

SEQ ID NO: 10058 - protein, 16 aa, Artificial Sequence
  Synthetically generated peptide
  VARIANT (1)..(16): Xaa = Any Amino Acid
CCEYACNXXPACTXGA

SEQ ID NO: 10059 - protein, 17 aa, Artificial Sequence
  Synthetically generated peptide
  VARIANT (1)..(17): Xaa = Any Amino Acid
CCEYACNXXPACTXXGA

SEQ ID NO: 10060 - protein, 17 aa, Artificial Sequence
  Synthetically generated peptide
  VARIANT (1)..(17): Xaa = Any Amino Acid
CCEYACNXXPACTXGXA

SEQ ID NO: 10061 - protein, 16 aa, Artificial Sequence
  Synthetically generated peptide
  VARIANT (1)..(16): Xaa = Any Amino Acid
CCEYACNXXPACTGXA

SEQ ID NO: 10062 - protein, 17 aa, Artificial Sequence
  Synthetically generated peptide
  VARIANT (1)..(17): Xaa = Any Amino Acid
CCEYACNXXPACTGXXA

SEQ ID NO: 10063 - protein, 15 aa, Artificial Sequence
  Synthetically generated peptide
  VARIANT (1)..(15): Xaa = Any Amino Acid
CCEYACNXPXACTGA

SEQ ID NO: 10064 - protein, 16 aa, Artificial Sequence
  Synthetically generated peptide
  VARIANT (1)..(16): Xaa = Any Amino Acid
CCEYACNXPXXACTGA

SEQ ID NO: 10065 - protein, 17 aa, Artificial Sequence
  Synthetically generated peptide
  VARIANT (1)..(17): Xaa = Any Amino Acid
CCEYACNXPXXXACTGA

SEQ ID NO: 10066 - protein, 17 aa, Artificial Sequence
  Synthetically generated peptide
  VARIANT (1)..(17): Xaa = Any Amino Acid
CCEYACNXPXXAXCTGA

SEQ ID NO: 10067 - protein, 17 aa, Artificial Sequence
  Synthetically generated peptide
  VARIANT (1)..(17): Xaa = Any Amino Acid
CCEYACNXPXXACXTGA

SEQ ID NO: 10068 - protein, 17 aa, Artificial Sequence
  Synthetically generated peptide
  VARIANT (1)..(17): Xaa = Any Amino Acid
CCEYACNXPXXACTXGA

SEQ ID NO: 10069 - protein, 17 aa, Artificial Sequence
  Synthetically generated peptide
  VARIANT (1)..(17): Xaa = Any Amino Acid
CCEYACNXPXXACTGXA

SEQ ID NO: 10070 - protein, 16 aa, Artificial Sequence
  Synthetically generated peptide
  VARIANT (1)..(16): Xaa = Any Amino Acid
CCEYACNXPXAXCTGA

SEQ ID NO: 10071 - protein, 17 aa, Artificial Sequence
  Synthetically generated peptide
  VARIANT (1)..(17): Xaa = Any Amino Acid
CCEYACNXPXAXXCTGA

SEQ ID NO: 10072 - protein, 17 aa, Artificial Sequence
  Synthetically generated peptide
  VARIANT (1)..(17): Xaa = Any Amino Acid
CCEYACNXPXAXCXTGA

SEQ ID NO: 10073 - protein, 17 aa, Artificial Sequence
  Synthetically generated peptide
  VARIANT (1)..(17): Xaa = Any Amino Acid
CCEYACNXPXAXCTXGA

SEQ ID NO: 10074 - protein, 17 aa, Artificial Sequence
  Synthetically generated peptide
  VARIANT (1)..(17): Xaa = Any Amino Acid
CCEYACNXPXAXCTGXA

SEQ ID NO: 10075 - protein, 16 aa, Artificial Sequence
  Synthetically generated peptide
  VARIANT (1)..(16): Xaa = Any Amino Acid
CCEYACNXPXACXTGA

SEQ ID NO: 10076 - protein, 17 aa, Artificial Sequence
  Synthetically generated peptide
  VARIANT (1)..(17): Xaa = Any Amino Acid
CCEYACNXPXACXXTGA

SEQ ID NO: 10077 - protein, 17 aa, Artificial Sequence
  Synthetically generated peptide
  VARIANT (1)..(17): Xaa = Any Amino Acid
CCEYACNXPXACXTXGA

SEQ ID NO: 10078 - protein, 17 aa, Artificial Sequence
  Synthetically generated peptide
  VARIANT (1)..(17): Xaa = Any Amino Acid
CCEYACNXPXACXTGXA

SEQ ID NO: 10079 - protein, 16 aa, Artificial Sequence
  Synthetically generated peptide
  VARIANT (1)..(16): Xaa = Any Amino Acid
CCEYACNXPXACTXGA

SEQ ID NO: 10080 - protein, 17 aa, Artificial Sequence
  Synthetically generated peptide
  VARIANT (1)..(17): Xaa = Any Amino Acid
CCEYACNXPXACTXXGA

SEQ ID NO: 10081 - protein, 17 aa, Artificial Sequence
  Synthetically generated peptide
  VARIANT (1)..(17): Xaa = Any Amino Acid
CCEYACNXPXACTXGXA

SEQ ID NO: 10082 - protein, 16 aa, Artificial Sequence
  Synthetically generated peptide
  VARIANT (1)..(16): Xaa = Any Amino Acid
CCEYACNXPXACTGXA

SEQ ID NO: 10083 - protein, 17 aa, Artificial Sequence
  Synthetically generated peptide
  VARIANT (1)..(17): Xaa = Any Amino Acid
CCEYACNXPXACTGXXA

SEQ ID NO: 10084 - protein, 15 aa, Artificial Sequence
  Synthetically generated peptide
  VARIANT (1)..(15): Xaa = Any Amino Acid
CCEYACNXPAXCTGA

SEQ ID NO: 10085 - protein, 16 aa, Artificial Sequence
  Synthetically generated peptide
  VARIANT (1)..(16): Xaa = Any Amino Acid
CCEYACNXPAXXCTGA

SEQ ID NO: 10086 - protein, 17 aa, Artificial Sequence
  Synthetically generated peptide
  VARIANT (1)..(17): Xaa = Any Amino Acid
CCEYACNXPAXXXCTGA

SEQ ID NO: 10087 - protein, 17 aa, Artificial Sequence
  Synthetically generated peptide
  VARIANT (1)..(17): Xaa = Any Amino Acid
CCEYACNXPAXXCXTGA

SEQ ID NO: 10088 - protein, 17 aa, Artificial Sequence
  Synthetically generated peptide
  VARIANT (1)..(17): Xaa = Any Amino Acid
CCEYACNXPAXXCTXGA

SEQ ID NO: 10089 - protein, 17 aa, Artificial Sequence
  Synthetically generated peptide
  VARIANT (1)..(17): Xaa = Any Amino Acid
CCEYACNXPAXXCTGXA

SEQ ID NO: 10090 - protein, 16 aa, Artificial Sequence
  Synthetically generated peptide
  VARIANT (1)..(16): Xaa = Any Amino Acid
CCEYACNXPAXCXTGA

SEQ ID NO: 10091 - protein, 17 aa, Artificial Sequence
  Synthetically generated peptide
  VARIANT (1)..(17): Xaa = Any Amino Acid
CCEYACNXPAXCXXTGA

SEQ ID NO: 10092 - protein, 17 aa, Artificial Sequence
  Synthetically generated peptide
  VARIANT (1)..(17): Xaa = Any Amino Acid
CCEYACNXPAXCXTXGA

SEQ ID NO: 10093 - protein, 17 aa, Artificial Sequence
  Synthetically generated peptide
  VARIANT (1)..(17): Xaa = Any Amino Acid
CCEYACNXPAXCXTGXA

SEQ ID NO: 10094 - protein, 16 aa, Artificial Sequence
  Synthetically generated peptide
  VARIANT (1)..(16): Xaa = Any Amino Acid
CCEYACNXPAXCTXGA

SEQ ID NO: 10095 - protein, 17 aa, Artificial Sequence
  Synthetically generated peptide
  VARIANT (1)..(17): Xaa = Any Amino Acid
CCEYACNXPAXCTXXGA

SEQ ID NO: 10096 - protein, 17 aa, Artificial Sequence
  Synthetically generated peptide
  VARIANT (1)..(17): Xaa = Any Amino Acid
CCEYACNXPAXCTXGXA

SEQ ID NO: 10097 - protein, 16 aa, Artificial Sequence
  Synthetically generated peptide
  VARIANT (1)..(16): Xaa = Any Amino Acid
CCEYACNXPAXCTGXA

SEQ ID NO: 10098 - protein, 17 aa, Artificial Sequence
  Synthetically generated peptide
  VARIANT (1)..(17): Xaa = Any Amino Acid
CCEYACNXPAXCTGXXA

SEQ ID NO: 10099 - protein, 15 aa, Artificial Sequence
  Synthetically generated peptide
  VARIANT (1)..(15): Xaa = Any Amino Acid
CCEYACNXPACXTGA

SEQ ID NO: 10100 - protein, 16 aa, Artificial Sequence
  Synthetically generated peptide
  VARIANT (1)..(16): Xaa = Any Amino Acid
CCEYACNXPACXXTGA

SEQ ID NO: 10101 - protein, 17 aa, Artificial Sequence
  Synthetically generated peptide
  VARIANT (1)..(17): Xaa = Any Amino Acid
CCEYACNXPACXXXTGA

SEQ ID NO: 10102 - protein, 17 aa, Artificial Sequence
  Synthetically generated peptide
  VARIANT (1)..(17): Xaa = Any Amino Acid
CCEYACNXPACXXTXGA

SEQ ID NO: 10103 - protein, 17 aa, Artificial Sequence
  Synthetically generated peptide
  VARIANT (1)..(17): Xaa = Any Amino Acid
CCEYACNXPACXXTGXA

SEQ ID NO: 10104 - protein, 16 aa, Artificial Sequence
  Synthetically generated peptide
  VARIANT (1)..(16): Xaa = Any Amino Acid
CCEYACNXPACXTXGA

SEQ ID NO: 10105 - protein, 17 aa, Artificial Sequence
  Synthetically generated peptide
  VARIANT (1)..(17): Xaa = Any Amino Acid
CCEYACNXPACXTXXGA

SEQ ID NO: 10106 - protein, 17 aa, Artificial Sequence
  Synthetically generated peptide
  VARIANT (1)..(17): Xaa = Any Amino Acid
CCEYACNXPACXTXGXA

SEQ ID NO: 10107 - protein, 16 aa, Artificial Sequence
  Synthetically generated peptide
  VARIANT (1)..(16): Xaa = Any Amino Acid
CCEYACNXPACXTGXA

SEQ ID NO: 10108 - protein, 17 aa, Artificial Sequence
  Synthetically generated peptide
  VARIANT (1)..(17): Xaa = Any Amino Acid
CCEYACNXPACXTGXXA

SEQ ID NO: 10109 - protein, 15 aa, Artificial Sequence
  Synthetically generated peptide
  VARIANT (1)..(15): Xaa = Any Amino Acid
CCEYACNXPACTXGA

SEQ ID NO: 10110 - protein, 16 aa, Artificial Sequence
  Synthetically generated peptide
  VARIANT (1)..(16): Xaa = Any Amino Acid
CCEYACNXPACTXXGA

SEQ ID NO: 10111 - protein, 17 aa, Artificial Sequence
  Synthetically generated peptide
  VARIANT (1)..(17): Xaa = Any Amino Acid
CCEYACNXPACTXXXGA

SEQ ID NO: 10112 - protein, 17 aa, Artificial Sequence
  Synthetically generated peptide
  VARIANT (1)..(17): Xaa = Any Amino Acid
CCEYACNXPACTXXGXA

SEQ ID NO: 10113 - protein, 16 aa, Artificial Sequence
  Synthetically generated peptide
  VARIANT (1)..(16): Xaa = Any Amino Acid
CCEYACNXPACTXGXA

SEQ ID NO: 10114 - protein, 17 aa, Artificial Sequence
  Synthetically generated peptide
  VARIANT (1)..(17): Xaa = Any Amino Acid
CCEYACNXPACTXGXXA

SEQ ID NO: 10115 - protein, 15 aa, Artificial Sequence
  Synthetically generated peptide
  VARIANT (1)..(15): Xaa = Any Amino Acid
CCEYACNXPACTGXA

SEQ ID NO: 10116 - protein, 16 aa, Artificial Sequence
  Synthetically generated peptide
  VARIANT (1)..(16): Xaa = Any Amino Acid
CCEYACNXPACTGXXA

SEQ ID NO: 10117 - protein, 17 aa, Artificial Sequence
  Synthetically generated peptide
  VARIANT (1)..(17): Xaa = Any Amino Acid
CCEYACNXPACTGXXXA

SEQ ID NO: 10118 - protein, 14 aa, Artificial Sequence
  Synthetically generated peptide
  VARIANT (1)..(14): Xaa = Any Amino Acid
CCEYACNPXACTGA

SEQ ID NO: 10119 - protein, 15 aa, Artificial Sequence
  Synthetically generated peptide
  VARIANT (1)..(15): Xaa = Any Amino Acid
CCEYACNPXXACTGA

SEQ ID NO: 10120 - protein, 16 aa, Artificial Sequence
  Synthetically generated peptide
  VARIANT (1)..(16): Xaa = Any Amino Acid
CCEYACNPXXXACTGA

SEQ ID NO: 10121 - protein, 17 aa, Artificial Sequence
  Synthetically generated peptide
  VARIANT (1)..(17): Xaa = Any Amino Acid
CCEYACNPXXXXACTGA

SEQ ID NO: 10122 - protein, 17 aa, Artificial Sequence
  Synthetically generated peptide
  VARIANT (1)..(17): Xaa = Any Amino Acid
CCEYACNPXXXAXCTGA

SEQ ID NO: 10123 - protein, 17 aa, Artificial Sequence
  Synthetically generated peptide
  VARIANT (1)..(17): Xaa = Any Amino Acid
CCEYACNPXXXACXTGA

SEQ ID NO: 10124 - protein, 17 aa, Artificial Sequence
  Synthetically generated peptide
  VARIANT (1)..(17): Xaa = Any Amino Acid
CCEYACNPXXXACTXGA

SEQ ID NO: 10125 - protein, 17 aa, Artificial Sequence
  Synthetically generated peptide
  VARIANT (1)..(17): Xaa = Any Amino Acid
CCEYACNPXXXACTGXA

SEQ ID NO: 10126 - protein, 16 aa, Artificial Sequence
  Synthetically generated peptide
  VARIANT (1)..(16): Xaa = Any Amino Acid
CCEYACNPXXAXCTGA

SEQ ID NO: 10127 - protein, 17 aa, Artificial Sequence
  Synthetically generated peptide
  VARIANT (1)..(17): Xaa = Any Amino Acid
CCEYACNPXXAXXCTGA

SEQ ID NO: 10128 - protein, 17 aa, Artificial Sequence
  Synthetically generated peptide
  VARIANT (1)..(17): Xaa = Any Amino Acid
CCEYACNPXXAXCXTGA

SEQ ID NO: 10129 - protein, 17 aa, Artificial Sequence
  Synthetically generated peptide
  VARIANT (1)..(17): Xaa = Any Amino Acid
CCEYACNPXXAXCTXGA

SEQ ID NO: 10130 - protein, 17 aa, Artificial Sequence
  Synthetically generated peptide
  VARIANT (1)..(17): Xaa = Any Amino Acid
CCEYACNPXXAXCTGXA

SEQ ID NO: 10131 - protein, 16 aa, Artificial Sequence
  Synthetically generated peptide
  VARIANT (1)..(16): Xaa = Any Amino Acid
CCEYACNPXXACXTGA

SEQ ID NO: 10132 - protein, 17 aa, Artificial Sequence
  Synthetically generated peptide
  VARIANT (1)..(17): Xaa = Any Amino Acid
CCEYACNPXXACXXTGA

SEQ ID NO: 10133 - protein, 17 aa, Artificial Sequence
  Synthetically generated peptide
  VARIANT (1)..(17): Xaa = Any Amino Acid
CCEYACNPXXACXTXGA

SEQ ID NO: 10134 - protein, 17 aa, Artificial Sequence
  Synthetically generated peptide
  VARIANT (1)..(17): Xaa = Any Amino Acid
CCEYACNPXXACXTGXA

SEQ ID NO: 10135 - protein, 16 aa, Artificial Sequence
  Synthetically generated peptide
  VARIANT (1)..(16): Xaa = Any Amino Acid
CCEYACNPXXACTXGA

SEQ ID NO: 10136 - protein, 17 aa, Artificial Sequence
  Synthetically generated peptide
  VARIANT (1)..(17): Xaa = Any Amino Acid
CCEYACNPXXACTXXGA

SEQ ID NO: 10137 - protein, 17 aa, Artificial Sequence
  Synthetically generated peptide
  VARIANT (1)..(17): Xaa = Any Amino Acid
CCEYACNPXXACTXGXA

SEQ ID NO: 10138 - protein, 16 aa, Artificial Sequence
  Synthetically generated peptide
  VARIANT (1)..(16): Xaa = Any Amino Acid
CCEYACNPXXACTGXA

SEQ ID NO: 10139 - protein, 17 aa, Artificial Sequence
  Synthetically generated peptide
  VARIANT (1)..(17): Xaa = Any Amino Acid
CCEYACNPXXACTGXXA

SEQ ID NO: 10140 - protein, 15 aa, Artificial Sequence
  Synthetically generated peptide
  VARIANT (1)..(15): Xaa = Any Amino Acid
CCEYACNPXAXCTGA

SEQ ID NO: 10141 - protein, 16 aa, Artificial Sequence
  Synthetically generated peptide
  VARIANT (1)..(16): Xaa = Any Amino Acid
CCEYACNPXAXXCTGA

SEQ ID NO: 10142 - protein, 17 aa, Artificial Sequence
  Synthetically generated peptide
  VARIANT (1)..(17): Xaa = Any Amino Acid
CCEYACNPXAXXXCTGA

SEQ ID NO: 10143 - protein, 17 aa, Artificial Sequence
  Synthetically generated peptide
  VARIANT (1)..(17): Xaa = Any Amino Acid
CCEYACNPXAXXCXTGA

SEQ ID NO: 10144 - protein, 17 aa, Artificial Sequence
  Synthetically generated peptide
  VARIANT (1)..(17): Xaa = Any Amino Acid
CCEYACNPXAXXCTXGA

SEQ ID NO: 10145 - protein, 17 aa, Artificial Sequence
  Synthetically generated peptide
  VARIANT (1)..(17): Xaa = Any Amino Acid
CCEYACNPXAXXCTGXA

SEQ ID NO: 10146 - protein, 16 aa, Artificial Sequence
  Synthetically generated peptide
  VARIANT (1)..(16): Xaa = Any Amino Acid
CCEYACNPXAXCXTGA

SEQ ID NO: 10147 - protein, 17 aa, Artificial Sequence
  Synthetically generated peptide
  VARIANT (1)..(17): Xaa = Any Amino Acid
CCEYACNPXAXCXXTGA

SEQ ID NO: 10148 - protein, 17 aa, Artificial Sequence
  Synthetically generated peptide
  VARIANT (1)..(17): Xaa = Any Amino Acid
CCEYACNPXAXCXTXGA

SEQ ID NO: 10149 - protein, 17 aa, Artificial Sequence
  Synthetically generated peptide
  VARIANT (1)..(17): Xaa = Any Amino Acid
CCEYACNPXAXCXTGXA

SEQ ID NO: 10150 - protein, 16 aa, Artificial Sequence
  Synthetically generated peptide
  VARIANT (1)..(16): Xaa = Any Amino Acid
CCEYACNPXAXCTXGA

SEQ ID NO: 10151 - protein, 17 aa, Artificial Sequence
  Synthetically generated peptide
  VARIANT (1)..(17): Xaa = Any Amino Acid
CCEYACNPXAXCTXXGA

SEQ ID NO: 10152 - protein, 17 aa, Artificial Sequence
  Synthetically generated peptide
  VARIANT (1)..(17): Xaa = Any Amino Acid
CCEYACNPXAXCTXGXA

SEQ ID NO: 10153 - protein, 16 aa, Artificial Sequence
  Synthetically generated peptide
  VARIANT (1)..(16): Xaa = Any Amino Acid
CCEYACNPXAXCTGXA

SEQ ID NO: 10154 - protein, 17 aa, Artificial Sequence
  Synthetically generated peptide
  VARIANT (1)..(17): Xaa = Any Amino Acid
CCEYACNPXAXCTGXXA

SEQ ID NO: 10155 - protein, 15 aa, Artificial Sequence
  Synthetically generated peptide
  VARIANT (1)..(15): Xaa = Any Amino Acid
CCEYACNPXACXTGA

SEQ ID NO: 10156 - protein, 16 aa, Artificial Sequence
  Synthetically generated peptide
  VARIANT (1)..(16): Xaa = Any Amino Acid
CCEYACNPXACXXTGA

SEQ ID NO: 10157 - protein, 17 aa, Artificial Sequence
  Synthetically generated peptide
  VARIANT (1)..(17): Xaa = Any Amino Acid
CCEYACNPXACXXXTGA

SEQ ID NO: 10158 - protein, 17 aa, Artificial Sequence
  Synthetically generated peptide
  VARIANT (1)..(17): Xaa = Any Amino Acid
CCEYACNPXACXXTXGA

SEQ ID NO: 10159 - protein, 17 aa, Artificial Sequence
  Synthetically generated peptide
  VARIANT (1)..(17): Xaa = Any Amino Acid
CCEYACNPXACXXTGXA

SEQ ID NO: 10160 - protein, 16 aa, Artificial Sequence
  Synthetically generated peptide
  VARIANT (1)..(16): Xaa = Any Amino Acid
CCEYACNPXACXTXGA

SEQ ID NO: 10161 - protein, 17 aa, Artificial Sequence
  Synthetically generated peptide
  VARIANT (1)..(17): Xaa = Any Amino Acid
CCEYACNPXACXTXXGA

SEQ ID NO: 10162 - protein, 17 aa, Artificial Sequence
  Synthetically generated peptide
  VARIANT (1)..(17): Xaa = Any Amino Acid
CCEYACNPXACXTXGXA

SEQ ID NO: 10163 - protein, 16 aa, Artificial Sequence
  Synthetically generated peptide
  VARIANT (1)..(16): Xaa = Any Amino Acid
CCEYACNPXACXTGXA

SEQ ID NO: 10164 - protein, 17 aa, Artificial Sequence
  Synthetically generated peptide
  VARIANT (1)..(17): Xaa = Any Amino Acid
CCEYACNPXACXTGXXA

SEQ ID NO: 10165 - protein, 15 aa, Artificial Sequence
  Synthetically generated peptide
  VARIANT (1)..(15): Xaa = Any Amino Acid
CCEYACNPXACTXGA

SEQ ID NO: 10166 - protein, 16 aa, Artificial Sequence
  Synthetically generated peptide
  VARIANT (1)..(16): Xaa = Any Amino Acid
CCEYACNPXACTXXGA

SEQ ID NO: 10167 - protein, 17 aa, Artificial Sequence
  Synthetically generated peptide
  VARIANT (1)..(17): Xaa = Any Amino Acid
CCEYACNPXACTXXXGA

SEQ ID NO: 10168 - protein, 17 aa, Artificial Sequence
  Synthetically generated peptide
  VARIANT (1)..(17): Xaa = Any Amino Acid
CCEYACNPXACTXXGXA

SEQ ID NO: 10169 - protein, 16 aa, Artificial Sequence
  Synthetically generated peptide
  VARIANT (1)..(16): Xaa = Any Amino Acid
CCEYACNPXACTXGXA

SEQ ID NO: 10170 - protein, 17 aa, Artificial Sequence
  Synthetically generated peptide
  VARIANT (1)..(17): Xaa = Any Amino Acid
CCEYACNPXACTXGXXA

SEQ ID NO: 10171 - protein, 15 aa, Artificial Sequence
  Synthetically generated peptide
  VARIANT (1)..(15): Xaa = Any Amino Acid
CCEYACNPXACTGXA

SEQ ID NO: 10172 - protein, 16 aa, Artificial Sequence
  Synthetically generated peptide
  VARIANT (1)..(16): Xaa = Any Amino Acid
CCEYACNPXACTGXXA

SEQ ID NO: 10173 - protein, 17 aa, Artificial Sequence
  Synthetically generated peptide
  VARIANT (1)..(17): Xaa = Any Amino Acid
CCEYACNPXACTGXXXA

SEQ ID NO: 10174 - protein, 14 aa, Artificial Sequence
  Synthetically generated peptide
  VARIANT (1)..(14): Xaa = Any Amino Acid
CCEYACNPAXCTGA

SEQ ID NO: 10175 - protein, 15 aa, Artificial Sequence
  Synthetically generated peptide
  VARIANT (1)..(15): Xaa = Any Amino Acid
CCEYACNPAXXCTGA

SEQ ID NO: 10176 - protein, 16 aa, Artificial Sequence
  Synthetically generated peptide
  VARIANT (1)..(16): Xaa = Any Amino Acid
CCEYACNPAXXXCTGA

SEQ ID NO: 10177 - protein, 17 aa, Artificial Sequence
  Synthetically generated peptide
  VARIANT (1)..(17): Xaa = Any Amino Acid
CCEYACNPAXXXXCTGA

SEQ ID NO: 10178 - protein, 17 aa, Artificial Sequence
  Synthetically generated peptide
  VARIANT (1)..(17): Xaa = Any Amino Acid
CCEYACNPAXXXCXTGA

SEQ ID NO: 10179 - protein, 17 aa, Artificial Sequence
  Synthetically generated peptide
  VARIANT (1)..(17): Xaa = Any Amino Acid
CCEYACNPAXXXCTXGA

SEQ ID NO: 10180 - protein, 17 aa, Artificial Sequence
  Synthetically generated peptide
  VARIANT (1)..(17): Xaa = Any Amino Acid
CCEYACNPAXXXCTGXA

SEQ ID NO: 10181 - protein, 16 aa, Artificial Sequence
  Synthetically generated peptide
  VARIANT (1)..(16): Xaa = Any Amino Acid
CCEYACNPAXXCXTGA

SEQ ID NO: 10182 - protein, 17 aa, Artificial Sequence
  Synthetically generated peptide
  VARIANT (1)..(17): Xaa = Any Amino Acid
CCEYACNPAXXCXXTGA

SEQ ID NO: 10183 - protein, 17 aa, Artificial Sequence
  Synthetically generated peptide
  VARIANT (1)..(17): Xaa = Any Amino Acid
CCEYACNPAXXCXTXGA

SEQ ID NO: 10184 - protein, 17 aa, Artificial Sequence
  Synthetically generated peptide
  VARIANT (1)..(17): Xaa = Any Amino Acid
CCEYACNPAXXCXTGXA

SEQ ID NO: 10185 - protein, 16 aa, Artificial Sequence
  Synthetically generated peptide
  VARIANT (1)..(16): Xaa = Any Amino Acid
CCEYACNPAXXCTXGA

SEQ ID NO: 10186 - protein, 17 aa, Artificial Sequence
  Synthetically generated peptide
  VARIANT (1)..(17): Xaa = Any Amino Acid
CCEYACNPAXXCTXXGA

SEQ ID NO: 10187 - protein, 17 aa, Artificial Sequence
  Synthetically generated peptide
  VARIANT (1)..(17): Xaa = Any Amino Acid
CCEYACNPAXXCTXGXA

SEQ ID NO: 10188 - protein, 16 aa, Artificial Sequence
  Synthetically generated peptide
  VARIANT (1)..(16): Xaa = Any Amino Acid
CCEYACNPAXXCTGXA

SEQ ID NO: 10189 - protein, 17 aa, Artificial Sequence
  Synthetically generated peptide
  VARIANT (1)..(17): Xaa = Any Amino Acid
CCEYACNPAXXCTGXXA

SEQ ID NO: 10190 - protein, 15 aa, Artificial Sequence
  Synthetically generated peptide
  VARIANT (1)..(15): Xaa = Any Amino Acid
CCEYACNPAXCXTGA

SEQ ID NO: 10191 - protein, 16 aa, Artificial Sequence
  Synthetically generated peptide
  VARIANT (1)..(16): Xaa = Any Amino Acid
CCEYACNPAXCXXTGA

SEQ ID NO: 10192 - protein, 17 aa, Artificial Sequence
  Synthetically generated peptide
  VARIANT (1)..(17): Xaa = Any Amino Acid
CCEYACNPAXCXXXTGA

SEQ ID NO: 10193 - protein, 17 aa, Artificial Sequence
  Synthetically generated peptide
  VARIANT (1)..(17): Xaa = Any Amino Acid
CCEYACNPAXCXXTXGA

SEQ ID NO: 10194 - protein, 17 aa, Artificial Sequence
  Synthetically generated peptide
  VARIANT (1)..(17): Xaa = Any Amino Acid
CCEYACNPAXCXXTGXA

SEQ ID NO: 10195 - protein, 16 aa, Artificial Sequence
  Synthetically generated peptide
  VARIANT (1)..(16): Xaa = Any Amino Acid
CCEYACNPAXCXTXGA

SEQ ID NO: 10196 - protein, 17 aa, Artificial Sequence
  Synthetically generated peptide
  VARIANT (1)..(17): Xaa = Any Amino Acid
CCEYACNPAXCXTXXGA

SEQ ID NO: 10197 - protein, 17 aa, Artificial Sequence
  Synthetically generated peptide
  VARIANT (1)..(17): Xaa = Any Amino Acid
CCEYACNPAXCXTXGXA

SEQ ID NO: 10198 - protein, 16 aa, Artificial Sequence
  Synthetically generated peptide
  VARIANT (1)..(16): Xaa = Any Amino Acid
CCEYACNPAXCXTGXA

SEQ ID NO: 10199 - protein, 17 aa, Artificial Sequence
  Synthetically generated peptide
  VARIANT (1)..(17): Xaa = Any Amino Acid
CCEYACNPAXCXTGXXA

SEQ ID NO: 10200 - protein, 15 aa, Artificial Sequence
  Synthetically generated peptide
  VARIANT (1)..(15): Xaa = Any Amino Acid
CCEYACNPAXCTXGA

SEQ ID NO: 10201 - protein, 16 aa, Artificial Sequence
  Synthetically generated peptide
  VARIANT (1)..(16): Xaa = Any Amino Acid
CCEYACNPAXCTXXGA

SEQ ID NO: 10202 - protein, 17 aa, Artificial Sequence
  Synthetically generated peptide
  VARIANT (1)..(17): Xaa = Any Amino Acid
CCEYACNPAXCTXXXGA

SEQ ID NO: 10203 - protein, 17 aa, Artificial Sequence
  Synthetically generated peptide
  VARIANT (1)..(17): Xaa = Any Amino Acid
CCEYACNPAXCTXXGXA

SEQ ID NO: 10204 - protein, 16 aa, Artificial Sequence
  Synthetically generated peptide
  VARIANT (1)..(16): Xaa = Any Amino Acid
CCEYACNPAXCTXGXA

SEQ ID NO: 10205 - protein, 17 aa, Artificial Sequence
  Synthetically generated peptide
  VARIANT (1)..(17): Xaa = Any Amino Acid
CCEYACNPAXCTXGXXA

SEQ ID NO: 10206 - protein, 15 aa, Artificial Sequence
  Synthetically generated peptide
  VARIANT (1)..(15): Xaa = Any Amino Acid
CCEYACNPAXCTGXA

SEQ ID NO: 10207 - protein, 16 aa, Artificial Sequence
  Synthetically generated peptide
  VARIANT (1)..(16): Xaa = Any Amino Acid
CCEYACNPAXCTGXXA

SEQ ID NO: 10208 - protein, 17 aa, Artificial Sequence
  Synthetically generated peptide
  VARIANT (1)..(17): Xaa = Any Amino Acid
CCEYACNPAXCTGXXXA

SEQ ID NO: 10209 - protein, 14 aa, Artificial Sequence
  Synthetically generated peptide
  VARIANT (1)..(14): Xaa = Any Amino Acid
CCEYACNPACXTGA

SEQ ID NO: 10210 - protein, 15 aa, Artificial Sequence
  Synthetically generated peptide
  VARIANT (1)..(15): Xaa = Any Amino Acid
CCEYACNPACXXTGA

SEQ ID NO: 10211 - protein, 16 aa, Artificial Sequence
  Synthetically generated peptide
  VARIANT (1)..(16): Xaa = Any Amino Acid
CCEYACNPACXXXTGA

SEQ ID NO: 10212 - protein, 17 aa, Artificial Sequence
  Synthetically generated peptide
  VARIANT (1)..(17): Xaa = Any Amino Acid
CCEYACNPACXXXXTGA

SEQ ID NO: 10213 - protein, 17 aa, Artificial Sequence
  Synthetically generated peptide
  VARIANT (1)..(17): Xaa = Any Amino Acid
CCEYACNPACXXXTXGA

SEQ ID NO: 10214 - protein, 17 aa, Artificial Sequence
  Synthetically generated peptide
  VARIANT (1)..(17): Xaa = Any Amino Acid
CCEYACNPACXXXTGXA

SEQ ID NO: 10215 - protein, 16 aa, Artificial Sequence
  Synthetically generated peptide
  VARIANT (1)..(16): Xaa = Any Amino Acid
CCEYACNPACXXTXGA

SEQ ID NO: 10216 - protein, 17 aa, Artificial Sequence
  Synthetically generated peptide
  VARIANT (1)..(17): Xaa = Any Amino Acid
CCEYACNPACXXTXXGA

SEQ ID NO: 10217 - protein, 17 aa, Artificial Sequence
  Synthetically generated peptide
  VARIANT (1)..(17): Xaa = Any Amino Acid
CCEYACNPACXXTXGXA

SEQ ID NO: 10218 - protein, 16 aa, Artificial Sequence
  Synthetically generated peptide
  VARIANT (1)..(16): Xaa = Any Amino Acid
CCEYACNPACXXTGXA

SEQ ID NO: 10219 - protein, 17 aa, Artificial Sequence
  Synthetically generated peptide
  VARIANT (1)..(17): Xaa = Any Amino Acid
CCEYACNPACXXTGXXA

SEQ ID NO: 10220 - protein, 15 aa, Artificial Sequence
  Synthetically generated peptide
  VARIANT (1)..(15): Xaa = Any Amino Acid
CCEYACNPACXTXGA

SEQ ID NO: 10221 - protein, 16 aa, Artificial Sequence
  Synthetically generated peptide
  VARIANT (1)..(16): Xaa = Any Amino Acid
CCEYACNPACXTXXGA

SEQ ID NO: 10222 - protein, 17 aa, Artificial Sequence
  Synthetically generated peptide
  VARIANT (1)..(17): Xaa = Any Amino Acid
CCEYACNPACXTXXXGA

SEQ ID NO: 10223 - protein, 17 aa, Artificial Sequence
  Synthetically generated peptide
  VARIANT (1)..(17): Xaa = Any Amino Acid
CCEYACNPACXTXXGXA

SEQ ID NO: 10224 - protein, 16 aa, Artificial Sequence
  Synthetically generated peptide
  VARIANT (1)..(16): Xaa = Any Amino Acid
CCEYACNPACXTXGXA

SEQ ID NO: 10225 - protein, 17 aa, Artificial Sequence
  Synthetically generated peptide
  VARIANT (1)..(17): Xaa = Any Amino Acid
CCEYACNPACXTXGXXA

SEQ ID NO: 10226 - protein, 15 aa, Artificial Sequence
  Synthetically generated peptide
  VARIANT (1)..(15): Xaa = Any Amino Acid
CCEYACNPACXTGXA

SEQ ID NO: 10227 - protein, 16 aa, Artificial Sequence
  Synthetically generated peptide
  VARIANT (1)..(16): Xaa = Any Amino Acid
CCEYACNPACXTGXXA

SEQ ID NO: 10228 - protein, 17 aa, Artificial Sequence
  Synthetically generated peptide
  VARIANT (1)..(17): Xaa = Any Amino Acid
CCEYACNPACXTGXXXA

SEQ ID NO: 10229 - protein, 14 aa, Artificial Sequence
  Synthetically generated peptide
  VARIANT (1)..(14): Xaa = Any Amino Acid
CCEYACNPACTXGA

SEQ ID NO: 10230 - protein, 15 aa, Artificial Sequence
  Synthetically generated peptide
  VARIANT (1)..(15): Xaa = Any Amino Acid
CCEYACNPACTXXGA

SEQ ID NO: 10231 - protein, 16 aa, Artificial Sequence
  Synthetically generated peptide
  VARIANT (1)..(16): Xaa = Any Amino Acid
CCEYACNPACTXXXGA

SEQ ID NO: 10232 - protein, 17 aa, Artificial Sequence
  Synthetically generated peptide
  VARIANT (1)..(17): Xaa = Any Amino Acid
CCEYACNPACTXXXXGA

SEQ ID NO: 10233 - protein, 17 aa, Artificial Sequence
  Synthetically generated peptide
  VARIANT (1)..(17): Xaa = Any Amino Acid
CCEYACNPACTXXXGXA

SEQ ID NO: 10234 - protein, 16 aa, Artificial Sequence
  Synthetically generated peptide
  VARIANT (1)..(16): Xaa = Any Amino Acid
CCEYACNPACTXXGXA

SEQ ID NO: 10235 - protein, 17 aa, Artificial Sequence
  Synthetically generated peptide
  VARIANT (1)..(17): Xaa = Any Amino Acid
CCEYACNPACTXXGXXA

SEQ ID NO: 10236 - protein, 15 aa, Artificial Sequence
  Synthetically generated peptide
  VARIANT (1)..(15): Xaa = Any Amino Acid
CCEYACNPACTXGXA

SEQ ID NO: 10237 - protein, 16 aa, Artificial Sequence
  Synthetically generated peptide
  VARIANT (1)..(16): Xaa = Any Amino Acid
CCEYACNPACTXGXXA

SEQ ID NO: 10238 - protein, 17 aa, Artificial Sequence
  Synthetically generated peptide
  VARIANT (1)..(17): Xaa = Any Amino Acid
CCEYACNPACTXGXXXA

SEQ ID NO: 10239 - protein, 14 aa, Artificial Sequence
  Synthetically generated peptide
  VARIANT (1)..(14): Xaa = Any Amino Acid
CCEYACNPACTGXA

SEQ ID NO: 10240 - protein, 15 aa, Artificial Sequence
  Synthetically generated peptide
  VARIANT (1)..(15): Xaa = Any Amino Acid
CCEYACNPACTGXXA

SEQ ID NO: 10241 - protein, 16 aa, Artificial Sequence
  Synthetically generated peptide
  VARIANT (1)..(16): Xaa = Any Amino Acid
CCEYACNPACTGXXXA

SEQ ID NO: 10242 - protein, 17 aa, Artificial Sequence
  Synthetically generated peptide
  VARIANT (1)..(17): Xaa = Any Amino Acid
CCEYACNPACTGXXXXA

SEQ ID NO: 10243 - protein, 14 aa, Artificial Sequence
  Synthetically generated peptide
  VARIANT (1)..(14): Xaa = Any Amino Acid
ACXEFCANPACTGC

SEQ ID NO: 10244 - protein, 15 aa, Artificial Sequence
  Synthetically generated peptide
  VARIANT (1)..(15): Xaa = Any Amino Acid
ACXXEFCANPACTGC

SEQ ID NO: 10245 - protein, 16 aa, Artificial Sequence
  Synthetically generated peptide
  VARIANT (1)..(16): Xaa = Any Amino Acid
ACXXXEFCANPACTGC

SEQ ID NO: 10246 - protein, 17 aa, Artificial Sequence
  Synthetically generated peptide
  VARIANT (1)..(17): Xaa = Any Amino Acid
ACXXXXEFCANPACTGC

SEQ ID NO: 10247 - protein, 17 aa, Artificial Sequence
  Synthetically generated peptide
  VARIANT (1)..(17): Xaa = Any Amino Acid
ACXXXEXFCANPACTGC

SEQ ID NO: 10248 - protein, 17 aa, Artificial Sequence
  Synthetically generated peptide
  VARIANT (1)..(17): Xaa = Any Amino Acid
ACXXXEFXCANPACTGC

SEQ ID NO: 10249 - protein, 17 aa, Artificial Sequence
  Synthetically generated peptide
  VARIANT (1)..(17): Xaa = Any Amino Acid
ACXXXEFCAXNPACTGC

SEQ ID NO: 10250 - protein, 17 aa, Artificial Sequence
  Synthetically generated peptide
  VARIANT (1)..(17): Xaa = Any Amino Acid
ACXXXEFCANXPACTGC

SEQ ID NO: 10251 - protein, 17 aa, Artificial Sequence
  Synthetically generated peptide
  VARIANT (1)..(17): Xaa = Any Amino Acid
ACXXXEFCANPXACTGC

SEQ ID NO: 10252 - protein, 17 aa, Artificial Sequence
  Synthetically generated peptide
  VARIANT (1)..(17): Xaa = Any Amino Acid
ACXXXEFCANPAXCTGC

SEQ ID NO: 10253 - protein, 17 aa, Artificial Sequence
  Synthetically generated peptide
  VARIANT (1)..(17): Xaa = Any Amino Acid
ACXXXEFCANPACXTGC

SEQ ID NO: 10254 - protein, 17 aa, Artificial Sequence
  Synthetically generated peptide
  VARIANT (1)..(17): Xaa = Any Amino Acid
ACXXXEFCANPACTXGC

SEQ ID NO: 10255 - protein, 17 aa, Artificial Sequence
  Synthetically generated peptide
  VARIANT (1)..(17): Xaa = Any Amino Acid
ACXXXEFCANPACTGXC

SEQ ID NO: 10256 - protein, 16 aa, Artificial Sequence
  Synthetically generated peptide
  VARIANT (1)..(16): Xaa = Any Amino Acid
ACXXEXFCANPACTGC

SEQ ID NO: 10257 - protein, 17 aa, Artificial Sequence
  Synthetically generated peptide
  VARIANT (1)..(17): Xaa = Any Amino Acid
ACXXEXXFCANPACTGC

SEQ ID NO: 10258 - protein, 17 aa, Artificial Sequence
  Synthetically generated peptide
  VARIANT (1)..(17): Xaa = Any Amino Acid
ACXXEXFXCANPACTGC

SEQ ID NO: 10259 - protein, 17 aa, Artificial Sequence
  Synthetically generated peptide
  VARIANT (1)..(17): Xaa = Any Amino Acid
ACXXEXFCAXNPACTGC

SEQ ID NO: 10260 - protein, 17 aa, Artificial Sequence
  Synthetically generated peptide
  VARIANT (1)..(17): Xaa = Any Amino Acid
ACXXEXFCANXPACTGC

SEQ ID NO: 10261 - protein, 17 aa, Artificial Sequence
  Synthetically generated peptide
  VARIANT (1)..(17): Xaa = Any Amino Acid
ACXXEXFCANPXACTGC

SEQ ID NO: 10262 - protein, 17 aa, Artificial Sequence
  Synthetically generated peptide
  VARIANT (1)..(17): Xaa = Any Amino Acid
ACXXEXFCANPAXCTGC

SEQ ID NO: 10263 - protein, 17 aa, Artificial Sequence
  Synthetically generated peptide
  VARIANT (1)..(17): Xaa = Any Amino Acid
ACXXEXFCANPACXTGC

SEQ ID NO: 10264 - protein, 17 aa, Artificial Sequence
  Synthetically generated peptide
  VARIANT (1)..(17): Xaa = Any Amino Acid
ACXXEXFCANPACTXGC

SEQ ID NO: 10265 - protein, 17 aa, Artificial Sequence
  Synthetically generated peptide
  VARIANT (1)..(17): Xaa = Any Amino Acid
ACXXEXFCANPACTGXC

SEQ ID NO: 10266 - protein, 16 aa, Artificial Sequence
  Synthetically generated peptide
  VARIANT (1)..(16): Xaa = Any Amino Acid
ACXXEFXCANPACTGC

SEQ ID NO: 10267 - protein, 17 aa, Artificial Sequence
  Synthetically generated peptide
  VARIANT (1)..(17): Xaa = Any Amino Acid
ACXXEFXXCANPACTGC

SEQ ID NO: 10268 - protein, 17 aa, Artificial Sequence
  Synthetically generated peptide
  VARIANT (1)..(17): Xaa = Any Amino Acid
ACXXEFXCAXNPACTGC

SEQ ID NO: 10269 - protein, 17 aa, Artificial Sequence
  Synthetically generated peptide
  VARIANT (1)..(17): Xaa = Any Amino Acid
ACXXEFXCANXPACTGC

SEQ ID NO: 10270 - protein, 17 aa, Artificial Sequence
  Synthetically generated peptide
  VARIANT (1)..(17): Xaa = Any Amino Acid
ACXXEFXCANPXACTGC

SEQ ID NO: 10271 - protein, 17 aa, Artificial Sequence
  Synthetically generated peptide
  VARIANT (1)..(17): Xaa = Any Amino Acid
ACXXEFXCANPAXCTGC

SEQ ID NO: 10272 - protein, 17 aa, Artificial Sequence
  Synthetically generated peptide
  VARIANT (1)..(17): Xaa = Any Amino Acid
ACXXEFXCANPACXTGC

SEQ ID NO: 10273 - protein, 17 aa, Artificial Sequence
  Synthetically generated peptide
  VARIANT (1)..(17): Xaa = Any Amino Acid
ACXXEFXCANPACTXGC

SEQ ID NO: 10274 - protein, 17 aa, Artificial Sequence
  Synthetically generated peptide
  VARIANT (1)..(17): Xaa = Any Amino Acid
ACXXEFXCANPACTGXC

SEQ ID NO: 10275 - protein, 16 aa, Artificial Sequence
  Synthetically generated peptide
  VARIANT (1)..(16): Xaa = Any Amino Acid
ACXXEFCAXNPACTGC

SEQ ID NO: 10276 - protein, 17 aa, Artificial Sequence
  Synthetically generated peptide
  VARIANT (1)..(17): Xaa = Any Amino Acid
ACXXEFCAXXNPACTGC

SEQ ID NO: 10277 - protein, 17 aa, Artificial Sequence
  Synthetically generated peptide
  VARIANT (1)..(17): Xaa = Any Amino Acid
ACXXEFCAXNXPACTGC

SEQ ID NO: 10278 - protein, 17 aa, Artificial Sequence
  Synthetically generated peptide
  VARIANT (1)..(17): Xaa = Any Amino Acid
ACXXEFCAXNPXACTGC

SEQ ID NO: 10279 - protein, 17 aa, Artificial Sequence
  Synthetically generated peptide
  VARIANT (1)..(17): Xaa = Any Amino Acid
ACXXEFCAXNPAXCTGC

SEQ ID NO: 10280 - protein, 17 aa, Artificial Sequence
  Synthetically generated peptide
  VARIANT (1)..(17): Xaa = Any Amino Acid
ACXXEFCAXNPACXTGC

SEQ ID NO: 10281 - protein, 17 aa, Artificial Sequence
  Synthetically generated peptide
  VARIANT (1)..(17): Xaa = Any Amino Acid
ACXXEFCAXNPACTXGC

SEQ ID NO: 10282 - protein, 17 aa, Artificial Sequence
  Synthetically generated peptide
  VARIANT (1)..(17): Xaa = Any Amino Acid
ACXXEFCAXNPACTGXC

SEQ ID NO: 10283 - protein, 16 aa, Artificial Sequence
  Synthetically generated peptide
  VARIANT (1)..(16): Xaa = Any Amino Acid
ACXXEFCANXPACTGC

SEQ ID NO: 10284 - protein, 17 aa, Artificial Sequence
  Synthetically generated peptide
  VARIANT (1)..(17): Xaa = Any Amino Acid
ACXXEFCANXXPACTGC

SEQ ID NO: 10285 - protein, 17 aa, Artificial Sequence
  Synthetically generated peptide
  VARIANT (1)..(17): Xaa = Any Amino Acid
ACXXEFCANXPXACTGC

SEQ ID NO: 10286 - protein, 17 aa, Artificial Sequence
  Synthetically generated peptide
  VARIANT (1)..(17): Xaa = Any Amino Acid
ACXXEFCANXPAXCTGC

SEQ ID NO: 10287 - protein, 17 aa, Artificial Sequence
  Synthetically generated peptide
  VARIANT (1)..(17): Xaa = Any Amino Acid
ACXXEFCANXPACXTGC

SEQ ID NO: 10288 - protein, 17 aa, Artificial Sequence
  Synthetically generated peptide
  VARIANT (1)..(17): Xaa = Any Amino Acid
ACXXEFCANXPACTXGC

SEQ ID NO: 10289 - protein, 17 aa, Artificial Sequence
  Synthetically generated peptide
  VARIANT (1)..(17): Xaa = Any Amino Acid
ACXXEFCANXPACTGXC

SEQ ID NO: 10290 - protein, 16 aa, Artificial Sequence
  Synthetically generated peptide
  VARIANT (1)..(16): Xaa = Any Amino Acid
ACXXEFCANPXACTGC

SEQ ID NO: 10291 - protein, 17 aa, Artificial Sequence
  Synthetically generated peptide
  VARIANT (1)..(17): Xaa = Any Amino Acid
ACXXEFCANPXXACTGC

SEQ ID NO: 10292 - protein, 17 aa, Artificial Sequence
  Synthetically generated peptide
  VARIANT (1)..(17): Xaa = Any Amino Acid
ACXXEFCANPXAXCTGC

SEQ ID NO: 10293 - protein, 17 aa, Artificial Sequence
  Synthetically generated peptide
  VARIANT (1)..(17): Xaa = Any Amino Acid
ACXXEFCANPXACXTGC

SEQ ID NO: 10294 - protein, 17 aa, Artificial Sequence
  Synthetically generated peptide
  VARIANT (1)..(17): Xaa = Any Amino Acid
ACXXEFCANPXACTXGC

SEQ ID NO: 10295 - protein, 17 aa, Artificial Sequence
  Synthetically generated peptide
  VARIANT (1)..(17): Xaa = Any Amino Acid
ACXXEFCANPXACTGXC

SEQ ID NO: 10296 - protein, 16 aa, Artificial Sequence
  Synthetically generated peptide
  VARIANT (1)..(16): Xaa = Any Amino Acid
ACXXEFCANPAXCTGC

SEQ ID NO: 10297 - protein, 17 aa, Artificial Sequence
  Synthetically generated peptide
  VARIANT (1)..(17): Xaa = Any Amino Acid
ACXXEFCANPAXXCTGC

SEQ ID NO: 10298 - protein, 17 aa, Artificial Sequence
  Synthetically generated peptide
  VARIANT (1)..(17): Xaa = Any Amino Acid
ACXXEFCANPAXCXTGC

SEQ ID NO: 10299 - protein, 17 aa, Artificial Sequence
  Synthetically generated peptide
  VARIANT (1)..(17): Xaa = Any Amino Acid
ACXXEFCANPAXCTXGC

SEQ ID NO: 10300 - protein, 17 aa, Artificial Sequence
  Synthetically generated peptide
  VARIANT (1)..(17): Xaa = Any Amino Acid
ACXXEFCANPAXCTGXC

SEQ ID NO: 10301 - protein, 16 aa, Artificial Sequence
  Synthetically generated peptide
  VARIANT (1)..(16): Xaa = Any Amino Acid
ACXXEFCANPACXTGC

SEQ ID NO: 10302 - protein, 17 aa, Artificial Sequence
  Synthetically generated peptide
  VARIANT (1)..(17): Xaa = Any Amino Acid
ACXXEFCANPACXXTGC

SEQ ID NO: 10303 - protein, 17 aa, Artificial Sequence
  Synthetically generated peptide
  VARIANT (1)..(17): Xaa = Any Amino Acid
ACXXEFCANPACXTXGC

SEQ ID NO: 10304 - protein, 17 aa, Artificial Sequence
  Synthetically generated peptide
  VARIANT (1)..(17): Xaa = Any Amino Acid
ACXXEFCANPACXTGXC

SEQ ID NO: 10305 - protein, 16 aa, Artificial Sequence
  Synthetically generated peptide
  VARIANT (1)..(16): Xaa = Any Amino Acid
ACXXEFCANPACTXGC

SEQ ID NO: 10306 - protein, 17 aa, Artificial Sequence
  Synthetically generated peptide
  VARIANT (1)..(17): Xaa = Any Amino Acid
ACXXEFCANPACTXXGC

SEQ ID NO: 10307 - protein, 17 aa, Artificial Sequence
  Synthetically generated peptide
  VARIANT (1)..(17): Xaa = Any Amino Acid
ACXXEFCANPACTXGXC

SEQ ID NO: 10308 - protein, 16 aa, Artificial Sequence
  Synthetically generated peptide
  VARIANT (1)..(16): Xaa = Any Amino Acid
ACXXEFCANPACTGXC

SEQ ID NO: 10309 - protein, 17 aa, Artificial Sequence
  Synthetically generated peptide
  VARIANT (1)..(17): Xaa = Any Amino Acid
ACXXEFCANPACTGXXC

SEQ ID NO: 10310 - protein, 15 aa, Artificial Sequence
  Synthetically generated peptide
  VARIANT (1)..(15): Xaa = Any Amino Acid
ACXEXFCANPACTGC

SEQ ID NO: 10311 - protein, 16 aa, Artificial Sequence
  Synthetically generated peptide
  VARIANT (1)..(16): Xaa = Any Amino Acid
ACXEXXFCANPACTGC

SEQ ID NO: 10312 - protein, 17 aa, Artificial Sequence
  Synthetically generated peptide
  VARIANT (1)..(17): Xaa = Any Amino Acid
ACXEXXXFCANPACTGC

SEQ ID NO: 10313 - protein, 17 aa, Artificial Sequence
  Synthetically generated peptide
  VARIANT (1)..(17): Xaa = Any Amino Acid
ACXEXXFXCANPACTGC

SEQ ID NO: 10314 - protein, 17 aa, Artificial Sequence
  Synthetically generated peptide
  VARIANT (1)..(17): Xaa = Any Amino Acid
ACXEXXFCAXNPACTGC

SEQ ID NO: 10315 - protein, 17 aa, Artificial Sequence
  Synthetically generated peptide
  VARIANT (1)..(17): Xaa = Any Amino Acid
ACXEXXFCANXPACTGC

SEQ ID NO: 10316 - protein, 17 aa, Artificial Sequence
  Synthetically generated peptide
  VARIANT (1)..(17): Xaa = Any Amino Acid
ACXEXXFCANPXACTGC

SEQ ID NO: 10317 - protein, 17 aa, Artificial Sequence
  Synthetically generated peptide
  VARIANT (1)..(17): Xaa = Any Amino Acid
ACXEXXFCANPAXCTGC

SEQ ID NO: 10318 - protein, 17 aa, Artificial Sequence
  Synthetically generated peptide
  VARIANT (1)..(17): Xaa = Any Amino Acid
ACXEXXFCANPACXTGC

SEQ ID NO: 10319 - protein, 17 aa, Artificial Sequence
  Synthetically generated peptide
  VARIANT (1)..(17): Xaa = Any Amino Acid
ACXEXXFCANPACTXGC

SEQ ID NO: 10320 - protein, 17 aa, Artificial Sequence
  Synthetically generated peptide
  VARIANT (1)..(17): Xaa = Any Amino Acid
ACXEXXFCANPACTGXC

SEQ ID NO: 10321 - protein, 16 aa, Artificial Sequence
  Synthetically generated peptide
  VARIANT (1)..(16): Xaa = Any Amino Acid
ACXEXFXCANPACTGC

SEQ ID NO: 10322 - protein, 17 aa, Artificial Sequence
  Synthetically generated peptide
  VARIANT (1)..(17): Xaa = Any Amino Acid
ACXEXFXXCANPACTGC

SEQ ID NO: 10323 - protein, 17 aa, Artificial Sequence
  Synthetically generated peptide
  VARIANT (1)..(17): Xaa = Any Amino Acid
ACXEXFXCAXNPACTGC

SEQ ID NO: 10324 - protein, 17 aa, Artificial Sequence
  Synthetically generated peptide
  VARIANT (1)..(17): Xaa = Any Amino Acid
ACXEXFXCANXPACTGC

SEQ ID NO: 10325 - protein, 17 aa, Artificial Sequence
  Synthetically generated peptide
  VARIANT (1)..(17): Xaa = Any Amino Acid
ACXEXFXCANPXACTGC

SEQ ID NO: 10326 - protein, 17 aa, Artificial Sequence
  Synthetically generated peptide
  VARIANT (1)..(17): Xaa = Any Amino Acid
ACXEXFXCANPAXCTGC

SEQ ID NO: 10327 - protein, 17 aa, Artificial Sequence
  Synthetically generated peptide
  VARIANT (1)..(17): Xaa = Any Amino Acid
ACXEXFXCANPACXTGC

SEQ ID NO: 10328 - protein, 17 aa, Artificial Sequence
  Synthetically generated peptide
  VARIANT (1)..(17): Xaa = Any Amino Acid
ACXEXFXCANPACTXGC

SEQ ID NO: 10329 - protein, 17 aa, Artificial Sequence
  Synthetically generated peptide
  VARIANT (1)..(17): Xaa = Any Amino Acid
ACXEXFXCANPACTGXC

SEQ ID NO: 10330 - protein, 16 aa, Artificial Sequence
  Synthetically generated peptide
  VARIANT (1)..(16): Xaa = Any Amino Acid
ACXEXFCAXNPACTGC

SEQ ID NO: 10331 - protein, 17 aa, Artificial Sequence
  Synthetically generated peptide
  VARIANT (1)..(17): Xaa = Any Amino Acid
ACXEXFCAXXNPACTGC

SEQ ID NO: 10332 - protein, 17 aa, Artificial Sequence
  Synthetically generated peptide
  VARIANT (1)..(17): Xaa = Any Amino Acid
ACXEXFCAXNXPACTGC

SEQ ID NO: 10333 - protein, 17 aa, Artificial Sequence
  Synthetically generated peptide
  VARIANT (1)..(17): Xaa = Any Amino Acid
ACXEXFCAXNPXACTGC

SEQ ID NO: 10334 - protein, 17 aa, Artificial Sequence
  Synthetically generated peptide
  VARIANT (1)..(17): Xaa = Any Amino Acid
ACXEXFCAXNPAXCTGC

SEQ ID NO: 10335 - protein, 17 aa, Artificial Sequence
  Synthetically generated peptide
  VARIANT (1)..(17): Xaa = Any Amino Acid
ACXEXFCAXNPACXTGC

SEQ ID NO: 10336 - protein, 17 aa, Artificial Sequence
  Synthetically generated peptide
  VARIANT (1)..(17): Xaa = Any Amino Acid
ACXEXFCAXNPACTXGC

SEQ ID NO: 10337 - protein, 17 aa, Artificial Sequence
  Synthetically generated peptide
  VARIANT (1)..(17): Xaa = Any Amino Acid
ACXEXFCAXNPACTGXC

SEQ ID NO: 10338 - protein, 16 aa, Artificial Sequence
  Synthetically generated peptide
  VARIANT (1)..(16): Xaa = Any Amino Acid
ACXEXFCANXPACTGC

SEQ ID NO: 10339 - protein, 17 aa, Artificial Sequence
  Synthetically generated peptide
  VARIANT (1)..(17): Xaa = Any Amino Acid
ACXEXFCANXXPACTGC

SEQ ID NO: 10340 - protein, 17 aa, Artificial Sequence
  Synthetically generated peptide
  VARIANT (1)..(17): Xaa = Any Amino Acid
ACXEXFCANXPXACTGC

SEQ ID NO: 10341 - protein, 17 aa, Artificial Sequence
  Synthetically generated peptide
  VARIANT (1)..(17): Xaa = Any Amino Acid
ACXEXFCANXPAXCTGC

SEQ ID NO: 10342 - protein, 17 aa, Artificial Sequence
  Synthetically generated peptide
  VARIANT (1)..(17): Xaa = Any Amino Acid
ACXEXFCANXPACXTGC

SEQ ID NO: 10343 - protein, 17 aa, Artificial Sequence
  Synthetically generated peptide
  VARIANT (1)..(17): Xaa = Any Amino Acid
ACXEXFCANXPACTXGC

SEQ ID NO: 10344 - protein, 17 aa, Artificial Sequence
  Synthetically generated peptide
  VARIANT (1)..(17): Xaa = Any Amino Acid
ACXEXFCANXPACTGXC

SEQ ID NO: 10345 - protein, 16 aa, Artificial Sequence
  Synthetically generated peptide
  VARIANT (1)..(16): Xaa = Any Amino Acid
ACXEXFCANPXACTGC

SEQ ID NO: 10346 - protein, 17 aa, Artificial Sequence
  Synthetically generated peptide
  VARIANT (1)..(17): Xaa = Any Amino Acid
ACXEXFCANPXXACTGC

SEQ ID NO: 10347 - protein, 17 aa, Artificial Sequence
  Synthetically generated peptide
  VARIANT (1)..(17): Xaa = Any Amino Acid
ACXEXFCANPXAXCTGC

SEQ ID NO: 10348 - protein, 17 aa, Artificial Sequence
  Synthetically generated peptide
  VARIANT (1)..(17): Xaa = Any Amino Acid
ACXEXFCANPXACXTGC

SEQ ID NO: 10349 - protein, 17 aa, Artificial Sequence
  Synthetically generated peptide
  VARIANT (1)..(17): Xaa = Any Amino Acid
ACXEXFCANPXACTXGC

SEQ ID NO: 10350 - protein, 17 aa, Artificial Sequence
  Synthetically generated peptide
  VARIANT (1)..(17): Xaa = Any Amino Acid
ACXEXFCANPXACTGXC

SEQ ID NO: 10351 - protein, 16 aa, Artificial Sequence
  Synthetically generated peptide
  VARIANT (1)..(16): Xaa = Any Amino Acid
ACXEXFCANPAXCTGC

SEQ ID NO: 10352 - protein, 17 aa, Artificial Sequence
  Synthetically generated peptide
  VARIANT (1)..(17): Xaa = Any Amino Acid
ACXEXFCANPAXXCTGC

SEQ ID NO: 10353 - protein, 17 aa, Artificial Sequence
  Synthetically generated peptide
  VARIANT (1)..(17): Xaa = Any Amino Acid
ACXEXFCANPAXCXTGC

SEQ ID NO: 10354 - protein, 17 aa, Artificial Sequence
  Synthetically generated peptide
  VARIANT (1)..(17): Xaa = Any Amino Acid
ACXEXFCANPAXCTXGC

SEQ ID NO: 10355 - protein, 17 aa, Artificial Sequence
  Synthetically generated peptide
  VARIANT (1)..(17): Xaa = Any Amino Acid
ACXEXFCANPAXCTGXC

SEQ ID NO: 10356 - protein, 16 aa, Artificial Sequence
  Synthetically generated peptide
  VARIANT (1)..(16): Xaa = Any Amino Acid
ACXEXFCANPACXTGC

SEQ ID NO: 10357 - protein, 17 aa, Artificial Sequence
  Synthetically generated peptide
  VARIANT (1)..(17): Xaa = Any Amino Acid
ACXEXFCANPACXXTGC

SEQ ID NO: 10358 - protein, 17 aa, Artificial Sequence
  Synthetically generated peptide
  VARIANT (1)..(17): Xaa = Any Amino Acid
ACXEXFCANPACXTXGC

SEQ ID NO: 10359 - protein, 17 aa, Artificial Sequence
  Synthetically generated peptide
  VARIANT (1)..(17): Xaa = Any Amino Acid
ACXEXFCANPACXTGXC

SEQ ID NO: 10360 - protein, 16 aa, Artificial Sequence
  Synthetically generated peptide
  VARIANT (1)..(16): Xaa = Any Amino Acid
ACXEXFCANPACTXGC

SEQ ID NO: 10361 - protein, 17 aa, Artificial Sequence
  Synthetically generated peptide
  VARIANT (1)..(17): Xaa = Any Amino Acid
ACXEXFCANPACTXXGC

SEQ ID NO: 10362 - protein, 17 aa, Artificial Sequence
  Synthetically generated peptide
  VARIANT (1)..(17): Xaa = Any Amino Acid
ACXEXFCANPACTXGXC

SEQ ID NO: 10363 - protein, 16 aa, Artificial Sequence
  Synthetically generated peptide
  VARIANT (1)..(16): Xaa = Any Amino Acid
ACXEXFCANPACTGXC

SEQ ID NO: 10364 - protein, 17 aa, Artificial Sequence
  Synthetically generated peptide
  VARIANT (1)..(17): Xaa = Any Amino Acid
ACXEXFCANPACTGXXC

SEQ ID NO: 10365 - protein, 15 aa, Artificial Sequence
  Synthetically generated peptide
  VARIANT (1)..(15): Xaa = Any Amino Acid
ACXEFXCANPACTGC

SEQ ID NO: 10366 - protein, 16 aa, Artificial Sequence
  Synthetically generated peptide
  VARIANT (1)..(16): Xaa = Any Amino Acid
ACXEFXXCANPACTGC

SEQ ID NO: 10367 - protein, 17 aa, Artificial Sequence
  Synthetically generated peptide
  VARIANT (1)..(17): Xaa = Any Amino Acid
ACXEFXXXCANPACTGC

SEQ ID NO: 10368 - protein, 17 aa, Artificial Sequence
  Synthetically generated peptide
  VARIANT (1)..(17): Xaa = Any Amino Acid
ACXEFXXCAXNPACTGC

SEQ ID NO: 10369 - protein, 17 aa, Artificial Sequence
  Synthetically generated peptide
  VARIANT (1)..(17): Xaa = Any Amino Acid
ACXEFXXCANXPACTGC

SEQ ID NO: 10370 - protein, 17 aa, Artificial Sequence
  Synthetically generated peptide
  VARIANT (1)..(17): Xaa = Any Amino Acid
ACXEFXXCANPXACTGC

SEQ ID NO: 10371 - protein, 17 aa, Artificial Sequence
  Synthetically generated peptide
  VARIANT (1)..(17): Xaa = Any Amino Acid
ACXEFXXCANPAXCTGC

SEQ ID NO: 10372 - protein, 17 aa, Artificial Sequence
  Synthetically generated peptide
  VARIANT (1)..(17): Xaa = Any Amino Acid
ACXEFXXCANPACXTGC

SEQ ID NO: 10373 - protein, 17 aa, Artificial Sequence
  Synthetically generated peptide
  VARIANT (1)..(17): Xaa = Any Amino Acid
ACXEFXXCANPACTXGC

SEQ ID NO: 10374 - protein, 17 aa, Artificial Sequence
  Synthetically generated peptide
  VARIANT (1)..(17): Xaa = Any Amino Acid
ACXEFXXCANPACTGXC

SEQ ID NO: 10375 - protein, 16 aa, Artificial Sequence
  Synthetically generated peptide
  VARIANT (1)..(16): Xaa = Any Amino Acid
ACXEFXCAXNPACTGC

SEQ ID NO: 10376 - protein, 17 aa, Artificial Sequence
  Synthetically generated peptide
  VARIANT (1)..(17): Xaa = Any Amino Acid
ACXEFXCAXXNPACTGC

SEQ ID NO: 10377 - protein, 17 aa, Artificial Sequence
  Synthetically generated peptide
  VARIANT (1)..(17): Xaa = Any Amino Acid
ACXEFXCAXNXPACTGC

SEQ ID NO: 10378 - protein, 17 aa, Artificial Sequence
  Synthetically generated peptide
  VARIANT (1)..(17): Xaa = Any Amino Acid
ACXEFXCAXNPXACTGC

SEQ ID NO: 10379 - protein, 17 aa, Artificial Sequence
  Synthetically generated peptide
  VARIANT (1)..(17): Xaa = Any Amino Acid
ACXEFXCAXNPAXCTGC

SEQ ID NO: 10380 - protein, 17 aa, Artificial Sequence
  Synthetically generated peptide
  VARIANT (1)..(17): Xaa = Any Amino Acid
ACXEFXCAXNPACXTGC

SEQ ID NO: 10381 - protein, 17 aa, Artificial Sequence
  Synthetically generated peptide
  VARIANT (1)..(17): Xaa = Any Amino Acid
ACXEFXCAXNPACTXGC

SEQ ID NO: 10382 - protein, 17 aa, Artificial Sequence
  Synthetically generated peptide
  VARIANT (1)..(17): Xaa = Any Amino Acid
ACXEFXCAXNPACTGXC

SEQ ID NO: 10383 - protein, 16 aa, Artificial Sequence
  Synthetically generated peptide
  VARIANT (1)..(16): Xaa = Any Amino Acid
ACXEFXCANXPACTGC

SEQ ID NO: 10384 - protein, 17 aa, Artificial Sequence
  Synthetically generated peptide
  VARIANT (1)..(17): Xaa = Any Amino Acid
ACXEFXCANXXPACTGC

SEQ ID NO: 10385 - protein, 17 aa, Artificial Sequence
  Synthetically generated peptide
  VARIANT (1)..(17): Xaa = Any Amino Acid
ACXEFXCANXPXACTGC

SEQ ID NO: 10386 - protein, 17 aa, Artificial Sequence
  Synthetically generated peptide
  VARIANT (1)..(17): Xaa = Any Amino Acid
ACXEFXCANXPAXCTGC

SEQ ID NO: 10387 - protein, 17 aa, Artificial Sequence
  Synthetically generated peptide
  VARIANT (1)..(17): Xaa = Any Amino Acid
ACXEFXCANXPACXTGC

SEQ ID NO: 10388 - protein, 17 aa, Artificial Sequence
  Synthetically generated peptide
  VARIANT (1)..(17): Xaa = Any Amino Acid
ACXEFXCANXPACTXGC

SEQ ID NO: 10389 - protein, 17 aa, Artificial Sequence
  Synthetically generated peptide
  VARIANT (1)..(17): Xaa = Any Amino Acid
ACXEFXCANXPACTGXC

SEQ ID NO: 10390 - protein, 16 aa, Artificial Sequence
  Synthetically generated peptide
  VARIANT (1)..(16): Xaa = Any Amino Acid
ACXEFXCANPXACTGC

SEQ ID NO: 10391 - protein, 17 aa, Artificial Sequence
  Synthetically generated peptide
  VARIANT (1)..(17): Xaa = Any Amino Acid
ACXEFXCANPXXACTGC

SEQ ID NO: 10392 - protein, 17 aa, Artificial Sequence
  Synthetically generated peptide
  VARIANT (1)..(17): Xaa = Any Amino Acid
ACXEFXCANPXAXCTGC

SEQ ID NO: 10393 - protein, 17 aa, Artificial Sequence
  Synthetically generated peptide
  VARIANT (1)..(17): Xaa = Any Amino Acid
ACXEFXCANPXACXTGC

SEQ ID NO: 10394 - protein, 17 aa, Artificial Sequence
  Synthetically generated peptide
  VARIANT (1)..(17): Xaa = Any Amino Acid
ACXEFXCANPXACTXGC

SEQ ID NO: 10395 - protein, 17 aa, Artificial Sequence
  Synthetically generated peptide
  VARIANT (1)..(17): Xaa = Any Amino Acid
ACXEFXCANPXACTGXC

SEQ ID NO: 10396 - protein, 16 aa, Artificial Sequence
  Synthetically generated peptide
  VARIANT (1)..(16): Xaa = Any Amino Acid
ACXEFXCANPAXCTGC

SEQ ID NO: 10397 - protein, 17 aa, Artificial Sequence
  Synthetically generated peptide
  VARIANT (1)..(17): Xaa = Any Amino Acid
ACXEFXCANPAXXCTGC

SEQ ID NO: 10398 - protein, 17 aa, Artificial Sequence
  Synthetically generated peptide
  VARIANT (1)..(17): Xaa = Any Amino Acid
ACXEFXCANPAXCXTGC

SEQ ID NO: 10399 - protein, 17 aa, Artificial Sequence
  Synthetically generated peptide
  VARIANT (1)..(17): Xaa = Any Amino Acid
ACXEFXCANPAXCTXGC

SEQ ID NO: 10400 - protein, 17 aa, Artificial Sequence
  Synthetically generated peptide
  VARIANT (1)..(17): Xaa = Any Amino Acid
ACXEFXCANPAXCTGXC

SEQ ID NO: 10401 - protein, 16 aa, Artificial Sequence
  Synthetically generated peptide
  VARIANT (1)..(16): Xaa = Any Amino Acid
ACXEFXCANPACXTGC

SEQ ID NO: 10402 - protein, 17 aa, Artificial Sequence
  Synthetically generated peptide
  VARIANT (1)..(17): Xaa = Any Amino Acid
ACXEFXCANPACXXTGC

SEQ ID NO: 10403 - protein, 17 aa, Artificial Sequence
  Synthetically generated peptide
  VARIANT (1)..(17): Xaa = Any Amino Acid
ACXEFXCANPACXTXGC

SEQ ID NO: 10404 - protein, 17 aa, Artificial Sequence
  Synthetically generated peptide
  VARIANT (1)..(17): Xaa = Any Amino Acid
ACXEFXCANPACXTGXC

SEQ ID NO: 10405 - protein, 16 aa, Artificial Sequence
  Synthetically generated peptide
  VARIANT (1)..(16): Xaa = Any Amino Acid
ACXEFXCANPACTXGC

SEQ ID NO: 10406 - protein, 17 aa, Artificial Sequence
  Synthetically generated peptide
  VARIANT (1)..(17): Xaa = Any Amino Acid
ACXEFXCANPACTXXGC

SEQ ID NO: 10407 - protein, 17 aa, Artificial Sequence
  Synthetically generated peptide
  VARIANT (1)..(17): Xaa = Any Amino Acid
ACXEFXCANPACTXGXC

SEQ ID NO: 10408 - protein, 16 aa, Artificial Sequence
  Synthetically generated peptide
  VARIANT (1)..(16): Xaa = Any Amino Acid
ACXEFXCANPACTGXC

SEQ ID NO: 10409 - protein, 17 aa, Artificial Sequence
  Synthetically generated peptide
  VARIANT (1)..(17): Xaa = Any Amino Acid
ACXEFXCANPACTGXXC

SEQ ID NO: 10410 - protein, 15 aa, Artificial Sequence
  Synthetically generated peptide
  VARIANT (1)..(15): Xaa = Any Amino Acid
ACXEFCAXNPACTGC

SEQ ID NO: 10411 - protein, 16 aa, Artificial Sequence
  Synthetically generated peptide
  VARIANT (1)..(16): Xaa = Any Amino Acid
ACXEFCAXXNPACTGC

SEQ ID NO: 10412 - protein, 17 aa, Artificial Sequence
  Synthetically generated peptide
  VARIANT (1)..(17): Xaa = Any Amino Acid
ACXEFCAXXXNPACTGC

SEQ ID NO: 10413 - protein, 17 aa, Artificial Sequence
  Synthetically generated peptide
  VARIANT (1)..(17): Xaa = Any Amino Acid
ACXEFCAXXNXPACTGC

SEQ ID NO: 10414 - protein, 17 aa, Artificial Sequence
  Synthetically generated peptide
  VARIANT (1)..(17): Xaa = Any Amino Acid
ACXEFCAXXNPXACTGC

SEQ ID NO: 10415 - protein, 17 aa, Artificial Sequence
  Synthetically generated peptide
  VARIANT (1)..(17): Xaa = Any Amino Acid
ACXEFCAXXNPAXCTGC

SEQ ID NO: 10416 - protein, 17 aa, Artificial Sequence
  Synthetically generated peptide
  VARIANT (1)..(17): Xaa = Any Amino Acid
ACXEFCAXXNPACXTGC

SEQ ID NO: 10417 - protein, 17 aa, Artificial Sequence
  Synthetically generated peptide
  VARIANT (1)..(17): Xaa = Any Amino Acid
ACXEFCAXXNPACTXGC

SEQ ID NO: 10418 - protein, 17 aa, Artificial Sequence
  Synthetically generated peptide
  VARIANT (1)..(17): Xaa = Any Amino Acid
ACXEFCAXXNPACTGXC

SEQ ID NO: 10419 - protein, 16 aa, Artificial Sequence
  Synthetically generated peptide
  VARIANT (1)..(16): Xaa = Any Amino Acid
ACXEFCAXNXPACTGC

SEQ ID NO: 10420 - protein, 17 aa, Artificial Sequence
  Synthetically generated peptide
  VARIANT (1)..(17): Xaa = Any Amino Acid
ACXEFCAXNXXPACTGC

SEQ ID NO: 10421 - protein, 17 aa, Artificial Sequence
  Synthetically generated peptide
  VARIANT (1)..(17): Xaa = Any Amino Acid
ACXEFCAXNXPXACTGC

SEQ ID NO: 10422 - protein, 17 aa, Artificial Sequence
  Synthetically generated peptide
  VARIANT (1)..(17): Xaa = Any Amino Acid
ACXEFCAXNXPAXCTGC

SEQ ID NO: 10423 - protein, 17 aa, Artificial Sequence
  Synthetically generated peptide
  VARIANT (1)..(17): Xaa = Any Amino Acid
ACXEFCAXNXPACXTGC

SEQ ID NO: 10424 - protein, 17 aa, Artificial Sequence
  Synthetically generated peptide
  VARIANT (1)..(17): Xaa = Any Amino Acid
ACXEFCAXNXPACTXGC

SEQ ID NO: 10425 - protein, 17 aa, Artificial Sequence
  Synthetically generated peptide
  VARIANT (1)..(17): Xaa = Any Amino Acid
ACXEFCAXNXPACTGXC

SEQ ID NO: 10426 - protein, 16 aa, Artificial Sequence
  Synthetically generated peptide
  VARIANT (1)..(16): Xaa = Any Amino Acid
ACXEFCAXNPXACTGC

SEQ ID NO: 10427 - protein, 17 aa, Artificial Sequence
  Synthetically generated peptide
  VARIANT (1)..(17): Xaa = Any Amino Acid
ACXEFCAXNPXXACTGC

SEQ ID NO: 10428 - protein, 17 aa, Artificial Sequence
  Synthetically generated peptide
  VARIANT (1)..(17): Xaa = Any Amino Acid
ACXEFCAXNPXAXCTGC

SEQ ID NO: 10429 - protein, 17 aa, Artificial Sequence
  Synthetically generated peptide
  VARIANT (1)..(17): Xaa = Any Amino Acid
ACXEFCAXNPXACXTGC

SEQ ID NO: 10430 - protein, 17 aa, Artificial Sequence
  Synthetically generated peptide
  VARIANT (1)..(17): Xaa = Any Amino Acid
ACXEFCAXNPXACTXGC

SEQ ID NO: 10431 - protein, 17 aa, Artificial Sequence
  Synthetically generated peptide
  VARIANT (1)..(17): Xaa = Any Amino Acid
ACXEFCAXNPXACTGXC

SEQ ID NO: 10432 - protein, 16 aa, Artificial Sequence
  Synthetically generated peptide
  VARIANT (1)..(16): Xaa = Any Amino Acid
ACXEFCAXNPAXCTGC

SEQ ID NO: 10433 - protein, 17 aa, Artificial Sequence
  Synthetically generated peptide
  VARIANT (1)..(17): Xaa = Any Amino Acid
ACXEFCAXNPAXXCTGC

SEQ ID NO: 10434 - protein, 17 aa, Artificial Sequence
  Synthetically generated peptide
  VARIANT (1)..(17): Xaa = Any Amino Acid
ACXEFCAXNPAXCXTGC

SEQ ID NO: 10435 - protein, 17 aa, Artificial Sequence
  Synthetically generated peptide
  VARIANT (1)..(17): Xaa = Any Amino Acid
ACXEFCAXNPAXCTXGC

SEQ ID NO: 10436 - protein, 17 aa, Artificial Sequence
  Synthetically generated peptide
  VARIANT (1)..(17): Xaa = Any Amino Acid
ACXEFCAXNPAXCTGXC

SEQ ID NO: 10437 - protein, 16 aa, Artificial Sequence
  Synthetically generated peptide
  VARIANT (1)..(16): Xaa = Any Amino Acid
ACXEFCAXNPACXTGC

SEQ ID NO: 10438 - protein, 17 aa, Artificial Sequence
  Synthetically generated peptide
  VARIANT (1)..(17): Xaa = Any Amino Acid
ACXEFCAXNPACXXTGC

SEQ ID NO: 10439 - protein, 17 aa, Artificial Sequence
  Synthetically generated peptide
  VARIANT (1)..(17): Xaa = Any Amino Acid
ACXEFCAXNPACXTXGC

SEQ ID NO: 10440 - protein, 17 aa, Artificial Sequence
  Synthetically generated peptide
  VARIANT (1)..(17): Xaa = Any Amino Acid
ACXEFCAXNPACXTGXC

SEQ ID NO: 10441 - protein, 16 aa, Artificial Sequence
  Synthetically generated peptide
  VARIANT (1)..(16): Xaa = Any Amino Acid
ACXEFCAXNPACTXGC

SEQ ID NO: 10442 - protein, 17 aa, Artificial Sequence
  Synthetically generated peptide
  VARIANT (1)..(17): Xaa = Any Amino Acid
ACXEFCAXNPACTXXGC

SEQ ID NO: 10443 - protein, 17 aa, Artificial Sequence
  Synthetically generated peptide
  VARIANT (1)..(17): Xaa = Any Amino Acid
ACXEFCAXNPACTXGXC

SEQ ID NO: 10444 - protein, 16 aa, Artificial Sequence
  Synthetically generated peptide
  VARIANT (1)..(16): Xaa = Any Amino Acid
ACXEFCAXNPACTGXC

SEQ ID NO: 10445 - protein, 17 aa, Artificial Sequence
  Synthetically generated peptide
  VARIANT (1)..(17): Xaa = Any Amino Acid
ACXEFCAXNPACTGXXC

SEQ ID NO: 10446 - protein, 15 aa, Artificial Sequence
  Synthetically generated peptide
  VARIANT (1)..(15): Xaa = Any Amino Acid
ACXEFCANXPACTGC

SEQ ID NO: 10447 - protein, 16 aa, Artificial Sequence
  Synthetically generated peptide
  VARIANT (1)..(16): Xaa = Any Amino Acid
ACXEFCANXXPACTGC

SEQ ID NO: 10448 - protein, 17 aa, Artificial Sequence
  Synthetically generated peptide
  VARIANT (1)..(17): Xaa = Any Amino Acid
ACXEFCANXXXPACTGC

SEQ ID NO: 10449 - protein, 17 aa, Artificial Sequence
  Synthetically generated peptide
  VARIANT (1)..(17): Xaa = Any Amino Acid
ACXEFCANXXPXACTGC

SEQ ID NO: 10450 - protein, 17 aa, Artificial Sequence
  Synthetically generated peptide
  VARIANT (1)..(17): Xaa = Any Amino Acid
ACXEFCANXXPAXCTGC

SEQ ID NO: 10451 - protein, 17 aa, Artificial Sequence
  Synthetically generated peptide
  VARIANT (1)..(17): Xaa = Any Amino Acid
ACXEFCANXXPACXTGC

SEQ ID NO: 10452 - protein, 17 aa, Artificial Sequence
  Synthetically generated peptide
  VARIANT (1)..(17): Xaa = Any Amino Acid
ACXEFCANXXPACTXGC

SEQ ID NO: 10453 - protein, 17 aa, Artificial Sequence
  Synthetically generated peptide
  VARIANT (1)..(17): Xaa = Any Amino Acid
ACXEFCANXXPACTGXC

SEQ ID NO: 10454 - protein, 16 aa, Artificial Sequence
  Synthetically generated peptide
  VARIANT (1)..(16): Xaa = Any Amino Acid
ACXEFCANXPXACTGC

SEQ ID NO: 10455 - protein, 17 aa, Artificial Sequence
  Synthetically generated peptide
  VARIANT (1)..(17): Xaa = Any Amino Acid
ACXEFCANXPXXACTGC

SEQ ID NO: 10456 - protein, 17 aa, Artificial Sequence
  Synthetically generated peptide
  VARIANT (1)..(17): Xaa = Any Amino Acid
ACXEFCANXPXAXCTGC

SEQ ID NO: 10457 - protein, 17 aa, Artificial Sequence
  Synthetically generated peptide
  VARIANT (1)..(17): Xaa = Any Amino Acid
ACXEFCANXPXACXTGC

SEQ ID NO: 10458 - protein, 17 aa, Artificial Sequence
  Synthetically generated peptide
  VARIANT (1)..(17): Xaa = Any Amino Acid
ACXEFCANXPXACTXGC

SEQ ID NO: 10459 - protein, 17 aa, Artificial Sequence
  Synthetically generated peptide
  VARIANT (1)..(17): Xaa = Any Amino Acid
ACXEFCANXPXACTGXC

SEQ ID NO: 10460 - protein, 16 aa, Artificial Sequence
  Synthetically generated peptide
  VARIANT (1)..(16): Xaa = Any Amino Acid
ACXEFCANXPAXCTGC

SEQ ID NO: 10461 - protein, 17 aa, Artificial Sequence
  Synthetically generated peptide
  VARIANT (1)..(17): Xaa = Any Amino Acid
ACXEFCANXPAXXCTGC

SEQ ID NO: 10462 - protein, 17 aa, Artificial Sequence
  Synthetically generated peptide
  VARIANT (1)..(17): Xaa = Any Amino Acid
ACXEFCANXPAXCXTGC

SEQ ID NO: 10463 - protein, 17 aa, Artificial Sequence
  Synthetically generated peptide
  VARIANT (1)..(17): Xaa = Any Amino Acid
ACXEFCANXPAXCTXGC

SEQ ID NO: 10464 - protein, 17 aa, Artificial Sequence
  Synthetically generated peptide
  VARIANT (1)..(17): Xaa = Any Amino Acid
ACXEFCANXPAXCTGXC

SEQ ID NO: 10465 - protein, 16 aa, Artificial Sequence
  Synthetically generated peptide
  VARIANT (1)..(16): Xaa = Any Amino Acid
ACXEFCANXPACXTGC

SEQ ID NO: 10466 - protein, 17 aa, Artificial Sequence
  Synthetically generated peptide
  VARIANT (1)..(17): Xaa = Any Amino Acid
ACXEFCANXPACXXTGC

SEQ ID NO: 10467 - protein, 17 aa, Artificial Sequence
  Synthetically generated peptide
  VARIANT (1)..(17): Xaa = Any Amino Acid
ACXEFCANXPACXTXGC

SEQ ID NO: 10468 - protein, 17 aa, Artificial Sequence
  Synthetically generated peptide
  VARIANT (1)..(17): Xaa = Any Amino Acid
ACXEFCANXPACXTGXC

SEQ ID NO: 10469 - protein, 16 aa, Artificial Sequence
  Synthetically generated peptide
  VARIANT (1)..(16): Xaa = Any Amino Acid
ACXEFCANXPACTXGC

SEQ ID NO: 10470 - protein, 17 aa, Artificial Sequence
  Synthetically generated peptide
  VARIANT (1)..(17): Xaa = Any Amino Acid
ACXEFCANXPACTXXGC

SEQ ID NO: 10471 - protein, 17 aa, Artificial Sequence
  Synthetically generated peptide
  VARIANT (1)..(17): Xaa = Any Amino Acid
ACXEFCANXPACTXGXC

SEQ ID NO: 10472 - protein, 16 aa, Artificial Sequence
  Synthetically generated peptide
  VARIANT (1)..(16): Xaa = Any Amino Acid
ACXEFCANXPACTGXC

SEQ ID NO: 10473 - protein, 17 aa, Artificial Sequence
  Synthetically generated peptide
  VARIANT (1)..(17): Xaa = Any Amino Acid
ACXEFCANXPACTGXXC

SEQ ID NO: 10474 - protein, 15 aa, Artificial Sequence
  Synthetically generated peptide
  VARIANT (1)..(15): Xaa = Any Amino Acid
ACXEFCANPXACTGC

SEQ ID NO: 10475 - protein, 16 aa, Artificial Sequence
  Synthetically generated peptide
  VARIANT (1)..(16): Xaa = Any Amino Acid
ACXEFCANPXXACTGC

SEQ ID NO: 10476 - protein, 17 aa, Artificial Sequence
  Synthetically generated peptide
  VARIANT (1)..(17): Xaa = Any Amino Acid
ACXEFCANPXXXACTGC

SEQ ID NO: 10477 - protein, 17 aa, Artificial Sequence
  Synthetically generated peptide
  VARIANT (1)..(17): Xaa = Any Amino Acid
ACXEFCANPXXAXCTGC

SEQ ID NO: 10478 - protein, 17 aa, Artificial Sequence
  Synthetically generated peptide
  VARIANT (1)..(17): Xaa = Any Amino Acid
ACXEFCANPXXACXTGC

SEQ ID NO: 10479 - protein, 17 aa, Artificial Sequence
  Synthetically generated peptide
  VARIANT (1)..(17): Xaa = Any Amino Acid
ACXEFCANPXXACTXGC

SEQ ID NO: 10480 - protein, 17 aa, Artificial Sequence
  Synthetically generated peptide
  VARIANT (1)..(17): Xaa = Any Amino Acid
ACXEFCANPXXACTGXC

SEQ ID NO: 10481 - protein, 16 aa, Artificial Sequence
  Synthetically generated peptide
  VARIANT (1)..(16): Xaa = Any Amino Acid
ACXEFCANPXAXCTGC

SEQ ID NO: 10482 - protein, 17 aa, Artificial Sequence
  Synthetically generated peptide
  VARIANT (1)..(17): Xaa = Any Amino Acid
ACXEFCANPXAXXCTGC

SEQ ID NO: 10483 - protein, 17 aa, Artificial Sequence
  Synthetically generated peptide
  VARIANT (1)..(17): Xaa = Any Amino Acid
ACXEFCANPXAXCXTGC

SEQ ID NO: 10484 - protein, 17 aa, Artificial Sequence
  Synthetically generated peptide
  VARIANT (1)..(17): Xaa = Any Amino Acid
ACXEFCANPXAXCTXGC

SEQ ID NO: 10485 - protein, 17 aa, Artificial Sequence
  Synthetically generated peptide
  VARIANT (1)..(17): Xaa = Any Amino Acid
ACXEFCANPXAXCTGXC

SEQ ID NO: 10486 - protein, 16 aa, Artificial Sequence
  Synthetically generated peptide
  VARIANT (1)..(16): Xaa = Any Amino Acid
ACXEFCANPXACXTGC

SEQ ID NO: 10487 - protein, 17 aa, Artificial Sequence
  Synthetically generated peptide
  VARIANT (1)..(17): Xaa = Any Amino Acid
ACXEFCANPXACXXTGC

SEQ ID NO: 10488 - protein, 17 aa, Artificial Sequence
  Synthetically generated peptide
  VARIANT (1)..(17): Xaa = Any Amino Acid
ACXEFCANPXACXTXGC

SEQ ID NO: 10489 - protein, 17 aa, Artificial Sequence
  Synthetically generated peptide
  VARIANT (1)..(17): Xaa = Any Amino Acid
ACXEFCANPXACXTGXC

SEQ ID NO: 10490 - protein, 16 aa, Artificial Sequence
  Synthetically generated peptide
  VARIANT (1)..(16): Xaa = Any Amino Acid
ACXEFCANPXACTXGC

SEQ ID NO: 10491 - protein, 17 aa, Artificial Sequence
  Synthetically generated peptide
  VARIANT (1)..(17): Xaa = Any Amino Acid
ACXEFCANPXACTXXGC

SEQ ID NO: 10492 - protein, 17 aa, Artificial Sequence
  Synthetically generated peptide
  VARIANT (1)..(17): Xaa = Any Amino Acid
ACXEFCANPXACTXGXC

SEQ ID NO: 10493 - protein, 16 aa, Artificial Sequence
  Synthetically generated peptide
  VARIANT (1)..(16): Xaa = Any Amino Acid
ACXEFCANPXACTGXC

SEQ ID NO: 10494 - protein, 17 aa, Artificial Sequence
  Synthetically generated peptide
  VARIANT (1)..(17): Xaa = Any Amino Acid
ACXEFCANPXACTGXXC

SEQ ID NO: 10495 - protein, 15 aa, Artificial Sequence
  Synthetically generated peptide
  VARIANT (1)..(15): Xaa = Any Amino Acid
ACXEFCANPAXCTGC

SEQ ID NO: 10496 - protein, 16 aa, Artificial Sequence
  Synthetically generated peptide
  VARIANT (1)..(16): Xaa = Any Amino Acid
ACXEFCANPAXXCTGC

SEQ ID NO: 10497 - protein, 17 aa, Artificial Sequence
  Synthetically generated peptide
  VARIANT (1)..(17): Xaa = Any Amino Acid
ACXEFCANPAXXXCTGC

SEQ ID NO: 10498 - protein, 17 aa, Artificial Sequence
  Synthetically generated peptide
  VARIANT (1)..(17): Xaa = Any Amino Acid
ACXEFCANPAXXCXTGC

SEQ ID NO: 10499 - protein, 17 aa, Artificial Sequence
  Synthetically generated peptide
  VARIANT (1)..(17): Xaa = Any Amino Acid
ACXEFCANPAXXCTXGC

SEQ ID NO: 10500 - protein, 17 aa, Artificial Sequence
  Synthetically generated peptide
  VARIANT (1)..(17): Xaa = Any Amino Acid
ACXEFCANPAXXCTGXC

SEQ ID NO: 10501 - protein, 16 aa, Artificial Sequence
  Synthetically generated peptide
  VARIANT (1)..(16): Xaa = Any Amino Acid
ACXEFCANPAXCXTGC

SEQ ID NO: 10502 - protein, 17 aa, Artificial Sequence
  Synthetically generated peptide
  VARIANT (1)..(17): Xaa = Any Amino Acid
ACXEFCANPAXCXXTGC

SEQ ID NO: 10503 - protein, 17 aa, Artificial Sequence
  Synthetically generated peptide
  VARIANT (1)..(17): Xaa = Any Amino Acid
ACXEFCANPAXCXTXGC

SEQ ID NO: 10504 - protein, 17 aa, Artificial Sequence
  Synthetically generated peptide
  VARIANT (1)..(17): Xaa = Any Amino Acid
ACXEFCANPAXCXTGXC

SEQ ID NO: 10505 - protein, 16 aa, Artificial Sequence
  Synthetically generated peptide
  VARIANT (1)..(16): Xaa = Any Amino Acid
ACXEFCANPAXCTXGC

SEQ ID NO: 10506 - protein, 17 aa, Artificial Sequence
  Synthetically generated peptide
  VARIANT (1)..(17): Xaa = Any Amino Acid
ACXEFCANPAXCTXXGC

SEQ ID NO: 10507 - protein, 17 aa, Artificial Sequence
  Synthetically generated peptide
  VARIANT (1)..(17): Xaa = Any Amino Acid
ACXEFCANPAXCTXGXC

SEQ ID NO: 10508 - protein, 16 aa, Artificial Sequence
  Synthetically generated peptide
  VARIANT (1)..(16): Xaa = Any Amino Acid
ACXEFCANPAXCTGXC

SEQ ID NO: 10509 - protein, 17 aa, Artificial Sequence
  Synthetically generated peptide
  VARIANT (1)..(17): Xaa = Any Amino Acid
ACXEFCANPAXCTGXXC

SEQ ID NO: 10510 - protein, 15 aa, Artificial Sequence
  Synthetically generated peptide
  VARIANT (1)..(15): Xaa = Any Amino Acid
ACXEFCANPACXTGC

SEQ ID NO: 10511 - protein, 16 aa, Artificial Sequence
  Synthetically generated peptide
  VARIANT (1)..(16): Xaa = Any Amino Acid
ACXEFCANPACXXTGC

SEQ ID NO: 10512 - protein, 17 aa, Artificial Sequence
  Synthetically generated peptide
  VARIANT (1)..(17): Xaa = Any Amino Acid
ACXEFCANPACXXXTGC

SEQ ID NO: 10513 - protein, 17 aa, Artificial Sequence
  Synthetically generated peptide
  VARIANT (1)..(17): Xaa = Any Amino Acid
ACXEFCANPACXXTXGC

SEQ ID NO: 10514 - protein, 17 aa, Artificial Sequence
  Synthetically generated peptide
  VARIANT (1)..(17): Xaa = Any Amino Acid
ACXEFCANPACXXTGXC

SEQ ID NO: 10515 - protein, 16 aa, Artificial Sequence
  Synthetically generated peptide
  VARIANT (1)..(16): Xaa = Any Amino Acid
ACXEFCANPACXTXGC

SEQ ID NO: 10516 - protein, 17 aa, Artificial Sequence
  Synthetically generated peptide
  VARIANT (1)..(17): Xaa = Any Amino Acid
ACXEFCANPACXTXXGC

SEQ ID NO: 10517 - protein, 17 aa, Artificial Sequence
  Synthetically generated peptide
  VARIANT (1)..(17): Xaa = Any Amino Acid
ACXEFCANPACXTXGXC

SEQ ID NO: 10518 - protein, 16 aa, Artificial Sequence
  Synthetically generated peptide
  VARIANT (1)..(16): Xaa = Any Amino Acid
ACXEFCANPACXTGXC

SEQ ID NO: 10519 - protein, 17 aa, Artificial Sequence
  Synthetically generated peptide
  VARIANT (1)..(17): Xaa = Any Amino Acid
ACXEFCANPACXTGXXC

SEQ ID NO: 10520 - protein, 15 aa, Artificial Sequence
  Synthetically generated peptide
  VARIANT (1)..(15): Xaa = Any Amino Acid
ACXEFCANPACTXGC

SEQ ID NO: 10521 - protein, 16 aa, Artificial Sequence
  Synthetically generated peptide
  VARIANT (1)..(16): Xaa = Any Amino Acid
ACXEFCANPACTXXGC

SEQ ID NO: 10522 - protein, 17 aa, Artificial Sequence
  Synthetically generated peptide
  VARIANT (1)..(17): Xaa = Any Amino Acid
ACXEFCANPACTXXXGC

SEQ ID NO: 10523 - protein, 17 aa, Artificial Sequence
  Synthetically generated peptide
  VARIANT (1)..(17): Xaa = Any Amino Acid
ACXEFCANPACTXXGXC

SEQ ID NO: 10524 - protein, 16 aa, Artificial Sequence
  Synthetically generated peptide
  VARIANT (1)..(16): Xaa = Any Amino Acid
ACXEFCANPACTXGXC

SEQ ID NO: 10525 - protein, 17 aa, Artificial Sequence
  Synthetically generated peptide
  VARIANT (1)..(17): Xaa = Any Amino Acid
ACXEFCANPACTXGXXC

SEQ ID NO: 10526 - protein, 15 aa, Artificial Sequence
  Synthetically generated peptide
  VARIANT (1)..(15): Xaa = Any Amino Acid
ACXEFCANPACTGXC

SEQ ID NO: 10527 - protein, 16 aa, Artificial Sequence
  Synthetically generated peptide
  VARIANT (1)..(16): Xaa = Any Amino Acid
ACXEFCANPACTGXXC

SEQ ID NO: 10528 - protein, 17 aa, Artificial Sequence
  Synthetically generated peptide
  VARIANT (1)..(17): Xaa = Any Amino Acid
ACXEFCANPACTGXXXC

SEQ ID NO: 10529 - protein, 14 aa, Artificial Sequence
  Synthetically generated peptide
  VARIANT (1)..(14): Xaa = Any Amino Acid
ACEXFCANPACTGC

SEQ ID NO: 10530 - protein, 15 aa, Artificial Sequence
  Synthetically generated peptide
  VARIANT (1)..(15): Xaa = Any Amino Acid
ACEXXFCANPACTGC

SEQ ID NO: 10531 - protein, 16 aa, Artificial Sequence
  Synthetically generated peptide
  VARIANT (1)..(16): Xaa = Any Amino Acid
ACEXXXFCANPACTGC

SEQ ID NO: 10532 - protein, 17 aa, Artificial Sequence
  Synthetically generated peptide
  VARIANT (1)..(17): Xaa = Any Amino Acid
ACEXXXXFCANPACTGC

SEQ ID NO: 10533 - protein, 17 aa, Artificial Sequence
  Synthetically generated peptide
  VARIANT (1)..(17): Xaa = Any Amino Acid
ACEXXXFXCANPACTGC

SEQ ID NO: 10534 - protein, 17 aa, Artificial Sequence
  Synthetically generated peptide
  VARIANT (1)..(17): Xaa = Any Amino Acid
ACEXXXFCAXNPACTGC

SEQ ID NO: 10535 - protein, 17 aa, Artificial Sequence
  Synthetically generated peptide
  VARIANT (1)..(17): Xaa = Any Amino Acid
ACEXXXFCANXPACTGC

SEQ ID NO: 10536 - protein, 17 aa, Artificial Sequence
  Synthetically generated peptide
  VARIANT (1)..(17): Xaa = Any Amino Acid
ACEXXXFCANPXACTGC

SEQ ID NO: 10537 - protein, 17 aa, Artificial Sequence
  Synthetically generated peptide
  VARIANT (1)..(17): Xaa = Any Amino Acid
ACEXXXFCANPAXCTGC

SEQ ID NO: 10538 - protein, 17 aa, Artificial Sequence
  Synthetically generated peptide
  VARIANT (1)..(17): Xaa = Any Amino Acid
ACEXXXFCANPACXTGC

SEQ ID NO: 10539 - protein, 17 aa, Artificial Sequence
  Synthetically generated peptide
  VARIANT (1)..(17): Xaa = Any Amino Acid
ACEXXXFCANPACTXGC

SEQ ID NO: 10540 - protein, 17 aa, Artificial Sequence
  Synthetically generated peptide
  VARIANT (1)..(17): Xaa = Any Amino Acid
ACEXXXFCANPACTGXC

SEQ ID NO: 10541 - protein, 16 aa, Artificial Sequence
  Synthetically generated peptide
  VARIANT (1)..(16): Xaa = Any Amino Acid
ACEXXFXCANPACTGC

SEQ ID NO: 10542 - protein, 17 aa, Artificial Sequence
  Synthetically generated peptide
  VARIANT (1)..(17): Xaa = Any Amino Acid
ACEXXFXXCANPACTGC

SEQ ID NO: 10543 - protein, 17 aa, Artificial Sequence
  Synthetically generated peptide
  VARIANT (1)..(17): Xaa = Any Amino Acid
ACEXXFXCAXNPACTGC

SEQ ID NO: 10544 - protein, 17 aa, Artificial Sequence
  Synthetically generated peptide
  VARIANT (1)..(17): Xaa = Any Amino Acid
ACEXXFXCANXPACTGC

SEQ ID NO: 10545 - protein, 17 aa, Artificial Sequence
  Synthetically generated peptide
  VARIANT (1)..(17): Xaa = Any Amino Acid
ACEXXFXCANPXACTGC

SEQ ID NO: 10546 - protein, 17 aa, Artificial Sequence
  Synthetically generated peptide
  VARIANT (1)..(17): Xaa = Any Amino Acid
ACEXXFXCANPAXCTGC

SEQ ID NO: 10547 - protein, 17 aa, Artificial Sequence
  Synthetically generated peptide
  VARIANT (1)..(17): Xaa = Any Amino Acid
ACEXXFXCANPACXTGC

SEQ ID NO: 10548 - protein, 17 aa, Artificial Sequence
  Synthetically generated peptide
  VARIANT (1)..(17): Xaa = Any Amino Acid
ACEXXFXCANPACTXGC

SEQ ID NO: 10549 - protein, 17 aa, Artificial Sequence
  Synthetically generated peptide
  VARIANT (1)..(17): Xaa = Any Amino Acid
ACEXXFXCANPACTGXC

SEQ ID NO: 10550 - protein, 16 aa, Artificial Sequence
  Synthetically generated peptide
  VARIANT (1)..(16): Xaa = Any Amino Acid
ACEXXFCAXNPACTGC

SEQ ID NO: 10551 - protein, 17 aa, Artificial Sequence
  Synthetically generated peptide
  VARIANT (1)..(17): Xaa = Any Amino Acid
ACEXXFCAXXNPACTGC

SEQ ID NO: 10552 - protein, 17 aa, Artificial Sequence
  Synthetically generated peptide
  VARIANT (1)..(17): Xaa = Any Amino Acid
ACEXXFCAXNXPACTGC

SEQ ID NO: 10553 - protein, 17 aa, Artificial Sequence
  Synthetically generated peptide
  VARIANT (1)..(17): Xaa = Any Amino Acid
ACEXXFCAXNPXACTGC

SEQ ID NO: 10554 - protein, 17 aa, Artificial Sequence
  Synthetically generated peptide
  VARIANT (1)..(17): Xaa = Any Amino Acid
ACEXXFCAXNPAXCTGC

SEQ ID NO: 10555 - protein, 17 aa, Artificial Sequence
  Synthetically generated peptide
  VARIANT (1)..(17): Xaa = Any Amino Acid
ACEXXFCAXNPACXTGC

SEQ ID NO: 10556 - protein, 17 aa, Artificial Sequence
  Synthetically generated peptide
  VARIANT (1)..(17): Xaa = Any Amino Acid
ACEXXFCAXNPACTXGC

SEQ ID NO: 10557 - protein, 17 aa, Artificial Sequence
  Synthetically generated peptide
  VARIANT (1)..(17): Xaa = Any Amino Acid
ACEXXFCAXNPACTGXC

SEQ ID NO: 10558 - protein, 16 aa, Artificial Sequence
  Synthetically generated peptide
  VARIANT (1)..(16): Xaa = Any Amino Acid
ACEXXFCANXPACTGC

SEQ ID NO: 10559 - protein, 17 aa, Artificial Sequence
  Synthetically generated peptide
  VARIANT (1)..(17): Xaa = Any Amino Acid
ACEXXFCANXXPACTGC

SEQ ID NO: 10560 - protein, 17 aa, Artificial Sequence
  Synthetically generated peptide
  VARIANT (1)..(17): Xaa = Any Amino Acid
ACEXXFCANXPXACTGC

SEQ ID NO: 10561 - protein, 17 aa, Artificial Sequence
  Synthetically generated peptide
  VARIANT (1)..(17): Xaa = Any Amino Acid
ACEXXFCANXPAXCTGC

SEQ ID NO: 10562 - protein, 17 aa, Artificial Sequence
  Synthetically generated peptide
  VARIANT (1)..(17): Xaa = Any Amino Acid
ACEXXFCANXPACXTGC

SEQ ID NO: 10563 - protein, 17 aa, Artificial Sequence
  Synthetically generated peptide
  VARIANT (1)..(17): Xaa = Any Amino Acid
ACEXXFCANXPACTXGC

SEQ ID NO: 10564 - protein, 17 aa, Artificial Sequence
  Synthetically generated peptide
  VARIANT (1)..(17): Xaa = Any Amino Acid
ACEXXFCANXPACTGXC

SEQ ID NO: 10565 - protein, 16 aa, Artificial Sequence
  Synthetically generated peptide
  VARIANT (1)..(16): Xaa = Any Amino Acid
ACEXXFCANPXACTGC

SEQ ID NO: 10566 - protein, 17 aa, Artificial Sequence
  Synthetically generated peptide
  VARIANT (1)..(17): Xaa = Any Amino Acid
ACEXXFCANPXXACTGC

SEQ ID NO: 10567 - protein, 17 aa, Artificial Sequence
  Synthetically generated peptide
  VARIANT (1)..(17): Xaa = Any Amino Acid
ACEXXFCANPXAXCTGC

SEQ ID NO: 10568 - protein, 17 aa, Artificial Sequence
  Synthetically generated peptide
  VARIANT (1)..(17): Xaa = Any Amino Acid
ACEXXFCANPXACXTGC

SEQ ID NO: 10569 - protein, 17 aa, Artificial Sequence
  Synthetically generated peptide
  VARIANT (1)..(17): Xaa = Any Amino Acid
ACEXXFCANPXACTXGC

SEQ ID NO: 10570 - protein, 17 aa, Artificial Sequence
  Synthetically generated peptide
  VARIANT (1)..(17): Xaa = Any Amino Acid
ACEXXFCANPXACTGXC

SEQ ID NO: 10571 - protein, 16 aa, Artificial Sequence
  Synthetically generated peptide
  VARIANT (1)..(16): Xaa = Any Amino Acid
ACEXXFCANPAXCTGC

SEQ ID NO: 10572 - protein, 17 aa, Artificial Sequence
  Synthetically generated peptide
  VARIANT (1)..(17): Xaa = Any Amino Acid
ACEXXFCANPAXXCTGC

SEQ ID NO: 10573 - protein, 17 aa, Artificial Sequence
  Synthetically generated peptide
  VARIANT (1)..(17): Xaa = Any Amino Acid
ACEXXFCANPAXCXTGC

SEQ ID NO: 10574 - protein, 17 aa, Artificial Sequence
  Synthetically generated peptide
  VARIANT (1)..(17): Xaa = Any Amino Acid
ACEXXFCANPAXCTXGC

SEQ ID NO: 10575 - protein, 17 aa, Artificial Sequence
  Synthetically generated peptide
  VARIANT (1)..(17): Xaa = Any Amino Acid
ACEXXFCANPAXCTGXC

SEQ ID NO: 10576 - protein, 16 aa, Artificial Sequence
  Synthetically generated peptide
  VARIANT (1)..(16): Xaa = Any Amino Acid
ACEXXFCANPACXTGC

SEQ ID NO: 10577 - protein, 17 aa, Artificial Sequence
  Synthetically generated peptide
  VARIANT (1)..(17): Xaa = Any Amino Acid
ACEXXFCANPACXXTGC

SEQ ID NO: 10578 - protein, 17 aa, Artificial Sequence
  Synthetically generated peptide
  VARIANT (1)..(17): Xaa = Any Amino Acid
ACEXXFCANPACXTXGC

SEQ ID NO: 10579 - protein, 17 aa, Artificial Sequence
  Synthetically generated peptide
  VARIANT (1)..(17): Xaa = Any Amino Acid
ACEXXFCANPACXTGXC

SEQ ID NO: 10580 - protein, 16 aa, Artificial Sequence
  Synthetically generated peptide
  VARIANT (1)..(16): Xaa = Any Amino Acid
ACEXXFCANPACTXGC

SEQ ID NO: 10581 - protein, 17 aa, Artificial Sequence
  Synthetically generated peptide
  VARIANT (1)..(17): Xaa = Any Amino Acid
ACEXXFCANPACTXXGC

SEQ ID NO: 10582 - protein, 17 aa, Artificial Sequence
  Synthetically generated peptide
  VARIANT (1)..(17): Xaa = Any Amino Acid
ACEXXFCANPACTXGXC

SEQ ID NO: 10583 - protein, 16 aa, Artificial Sequence
  Synthetically generated peptide
  VARIANT (1)..(16): Xaa = Any Amino Acid
ACEXXFCANPACTGXC

SEQ ID NO: 10584 - protein, 17 aa, Artificial Sequence
  Synthetically generated peptide
  VARIANT (1)..(17): Xaa = Any Amino Acid
ACEXXFCANPACTGXXC

SEQ ID NO: 10585 - protein, 15 aa, Artificial Sequence
  Synthetically generated peptide
  VARIANT (1)..(15): Xaa = Any Amino Acid
ACEXFXCANPACTGC

SEQ ID NO: 10586 - protein, 16 aa, Artificial Sequence
  Synthetically generated peptide
  VARIANT (1)..(16): Xaa = Any Amino Acid
ACEXFXXCANPACTGC

SEQ ID NO: 10587 - protein, 17 aa, Artificial Sequence
  Synthetically generated peptide
  VARIANT (1)..(17): Xaa = Any Amino Acid
ACEXFXXXCANPACTGC

SEQ ID NO: 10588 - protein, 17 aa, Artificial Sequence
  Synthetically generated peptide
  VARIANT (1)..(17): Xaa = Any Amino Acid
ACEXFXXCAXNPACTGC

SEQ ID NO: 10589 - protein, 17 aa, Artificial Sequence
  Synthetically generated peptide
  VARIANT (1)..(17): Xaa = Any Amino Acid
ACEXFXXCANXPACTGC

SEQ ID NO: 10590 - protein, 17 aa, Artificial Sequence
  Synthetically generated peptide
  VARIANT (1)..(17): Xaa = Any Amino Acid
ACEXFXXCANPXACTGC

SEQ ID NO: 10591 - protein, 17 aa, Artificial Sequence
  Synthetically generated peptide
  VARIANT (1)..(17): Xaa = Any Amino Acid
ACEXFXXCANPAXCTGC

SEQ ID NO: 10592 - protein, 17 aa, Artificial Sequence
  Synthetically generated peptide
  VARIANT (1)..(17): Xaa = Any Amino Acid
ACEXFXXCANPACXTGC

SEQ ID NO: 10593 - protein, 17 aa, Artificial Sequence
  Synthetically generated peptide
  VARIANT (1)..(17): Xaa = Any Amino Acid
ACEXFXXCANPACTXGC

SEQ ID NO: 10594 - protein, 17 aa, Artificial Sequence
  Synthetically generated peptide
  VARIANT (1)..(17): Xaa = Any Amino Acid
ACEXFXXCANPACTGXC

SEQ ID NO: 10595 - protein, 16 aa, Artificial Sequence
  Synthetically generated peptide
  VARIANT (1)..(16): Xaa = Any Amino Acid
ACEXFXCAXNPACTGC

SEQ ID NO: 10596 - protein, 17 aa, Artificial Sequence
  Synthetically generated peptide
  VARIANT (1)..(17): Xaa = Any Amino Acid
ACEXFXCAXXNPACTGC

SEQ ID NO: 10597 - protein, 17 aa, Artificial Sequence
  Synthetically generated peptide
  VARIANT (1)..(17): Xaa = Any Amino Acid
ACEXFXCAXNXPACTGC

SEQ ID NO: 10598 - protein, 17 aa, Artificial Sequence
  Synthetically generated peptide
  VARIANT (1)..(17): Xaa = Any Amino Acid
ACEXFXCAXNPXACTGC

SEQ ID NO: 10599 - protein, 17 aa, Artificial Sequence
  Synthetically generated peptide
  VARIANT (1)..(17): Xaa = Any Amino Acid
ACEXFXCAXNPAXCTGC

SEQ ID NO: 10600 - protein, 17 aa, Artificial Sequence
  Synthetically generated peptide
  VARIANT (1)..(17): Xaa = Any Amino Acid
ACEXFXCAXNPACXTGC

SEQ ID NO: 10601 - protein, 17 aa, Artificial Sequence
  Synthetically generated peptide
  VARIANT (1)..(17): Xaa = Any Amino Acid
ACEXFXCAXNPACTXGC

SEQ ID NO: 10602 - protein, 17 aa, Artificial Sequence
  Synthetically generated peptide
  VARIANT (1)..(17): Xaa = Any Amino Acid
ACEXFXCAXNPACTGXC

SEQ ID NO: 10603 - protein, 16 aa, Artificial Sequence
  Synthetically generated peptide
  VARIANT (1)..(16): Xaa = Any Amino Acid
ACEXFXCANXPACTGC

SEQ ID NO: 10604 - protein, 17 aa, Artificial Sequence
  Synthetically generated peptide
  VARIANT (1)..(17): Xaa = Any Amino Acid
ACEXFXCANXXPACTGC

SEQ ID NO: 10605 - protein, 17 aa, Artificial Sequence
  Synthetically generated peptide
  VARIANT (1)..(17): Xaa = Any Amino Acid
ACEXFXCANXPXACTGC

SEQ ID NO: 10606 - protein, 17 aa, Artificial Sequence
  Synthetically generated peptide
  VARIANT (1)..(17): Xaa = Any Amino Acid
ACEXFXCANXPAXCTGC

SEQ ID NO: 10607 - protein, 17 aa, Artificial Sequence
  Synthetically generated peptide
  VARIANT (1)..(17): Xaa = Any Amino Acid
ACEXFXCANXPACXTGC

SEQ ID NO: 10608 - protein, 17 aa, Artificial Sequence
  Synthetically generated peptide
  VARIANT (1)..(17): Xaa = Any Amino Acid
ACEXFXCANXPACTXGC

SEQ ID NO: 10609 - protein, 17 aa, Artificial Sequence
  Synthetically generated peptide
  VARIANT (1)..(17): Xaa = Any Amino Acid
ACEXFXCANXPACTGXC

SEQ ID NO: 10610 - protein, 16 aa, Artificial Sequence
  Synthetically generated peptide
  VARIANT (1)..(16): Xaa = Any Amino Acid
ACEXFXCANPXACTGC

SEQ ID NO: 10611 - protein, 17 aa, Artificial Sequence
  Synthetically generated peptide
  VARIANT (1)..(17): Xaa = Any Amino Acid
ACEXFXCANPXXACTGC

SEQ ID NO: 10612 - protein, 17 aa, Artificial Sequence
  Synthetically generated peptide
  VARIANT (1)..(17): Xaa = Any Amino Acid
ACEXFXCANPXAXCTGC

SEQ ID NO: 10613 - protein, 17 aa, Artificial Sequence
  Synthetically generated peptide
  VARIANT (1)..(17): Xaa = Any Amino Acid
ACEXFXCANPXACXTGC

SEQ ID NO: 10614 - protein, 17 aa, Artificial Sequence
  Synthetically generated peptide
  VARIANT (1)..(17): Xaa = Any Amino Acid
ACEXFXCANPXACTXGC

SEQ ID NO: 10615 - protein, 17 aa, Artificial Sequence
  Synthetically generated peptide
  VARIANT (1)..(17): Xaa = Any Amino Acid
ACEXFXCANPXACTGXC

SEQ ID NO: 10616 - protein, 16 aa, Artificial Sequence
  Synthetically generated peptide
  VARIANT (1)..(16): Xaa = Any Amino Acid
ACEXFXCANPAXCTGC

SEQ ID NO: 10617 - protein, 17 aa, Artificial Sequence
  Synthetically generated peptide
  VARIANT (1)..(17): Xaa = Any Amino Acid
ACEXFXCANPAXXCTGC

SEQ ID NO: 10618 - protein, 17 aa, Artificial Sequence
  Synthetically generated peptide
  VARIANT (1)..(17): Xaa = Any Amino Acid
ACEXFXCANPAXCXTGC

SEQ ID NO: 10619 - protein, 17 aa, Artificial Sequence
  Synthetically generated peptide
  VARIANT (1)..(17): Xaa = Any Amino Acid
ACEXFXCANPAXCTXGC

SEQ ID NO: 10620 - protein, 17 aa, Artificial Sequence
  Synthetically generated peptide
  VARIANT (1)..(17): Xaa = Any Amino Acid
ACEXFXCANPAXCTGXC

SEQ ID NO: 10621 - protein, 16 aa, Artificial Sequence
  Synthetically generated peptide
  VARIANT (1)..(16): Xaa = Any Amino Acid
ACEXFXCANPACXTGC

SEQ ID NO: 10622 - protein, 17 aa, Artificial Sequence
  Synthetically generated peptide
  VARIANT (1)..(17): Xaa = Any Amino Acid
ACEXFXCANPACXXTGC

SEQ ID NO: 10623 - protein, 17 aa, Artificial Sequence
  Synthetically generated peptide
  VARIANT (1)..(17): Xaa = Any Amino Acid
ACEXFXCANPACXTXGC

SEQ ID NO: 10624 - protein, 17 aa, Artificial Sequence
  Synthetically generated peptide
  VARIANT (1)..(17): Xaa = Any Amino Acid
ACEXFXCANPACXTGXC

SEQ ID NO: 10625 - protein, 16 aa, Artificial Sequence
  Synthetically generated peptide
  VARIANT (1)..(16): Xaa = Any Amino Acid
ACEXFXCANPACTXGC

SEQ ID NO: 10626 - protein, 17 aa, Artificial Sequence
  Synthetically generated peptide
  VARIANT (1)..(17): Xaa = Any Amino Acid
ACEXFXCANPACTXXGC

SEQ ID NO: 10627 - protein, 17 aa, Artificial Sequence
  Synthetically generated peptide
  VARIANT (1)..(17): Xaa = Any Amino Acid
ACEXFXCANPACTXGXC

SEQ ID NO: 10628 - protein, 16 aa, Artificial Sequence
  Synthetically generated peptide
  VARIANT (1)..(16): Xaa = Any Amino Acid
ACEXFXCANPACTGXC

SEQ ID NO: 10629 - protein, 17 aa, Artificial Sequence
  Synthetically generated peptide
  VARIANT (1)..(17): Xaa = Any Amino Acid
ACEXFXCANPACTGXXC

SEQ ID NO: 10630 - protein, 15 aa, Artificial Sequence
  Synthetically generated peptide
  VARIANT (1)..(15): Xaa = Any Amino Acid
ACEXFCAXNPACTGC

SEQ ID NO: 10631 - protein, 16 aa, Artificial Sequence
  Synthetically generated peptide
  VARIANT (1)..(16): Xaa = Any Amino Acid
ACEXFCAXXNPACTGC

SEQ ID NO: 10632 - protein, 17 aa, Artificial Sequence
  Synthetically generated peptide
  VARIANT (1)..(17): Xaa = Any Amino Acid
ACEXFCAXXXNPACTGC

SEQ ID NO: 10633 - protein, 17 aa, Artificial Sequence
  Synthetically generated peptide
  VARIANT (1)..(17): Xaa = Any Amino Acid
ACEXFCAXXNXPACTGC

SEQ ID NO: 10634 - protein, 17 aa, Artificial Sequence
  Synthetically generated peptide
  VARIANT (1)..(17): Xaa = Any Amino Acid
ACEXFCAXXNPXACTGC

SEQ ID NO: 10635 - protein, 17 aa, Artificial Sequence
  Synthetically generated peptide
  VARIANT (1)..(17): Xaa = Any Amino Acid
ACEXFCAXXNPAXCTGC

SEQ ID NO: 10636 - protein, 17 aa, Artificial Sequence
  Synthetically generated peptide
  VARIANT (1)..(17): Xaa = Any Amino Acid
ACEXFCAXXNPACXTGC

SEQ ID NO: 10637 - protein, 17 aa, Artificial Sequence
  Synthetically generated peptide
  VARIANT (1)..(17): Xaa = Any Amino Acid
ACEXFCAXXNPACTXGC

SEQ ID NO: 10638 - protein, 17 aa, Artificial Sequence
  Synthetically generated peptide
  VARIANT (1)..(17): Xaa = Any Amino Acid
ACEXFCAXXNPACTGXC

SEQ ID NO: 10639 - protein, 16 aa, Artificial Sequence
  Synthetically generated peptide
  VARIANT (1)..(16): Xaa = Any Amino Acid
ACEXFCAXNXPACTGC

SEQ ID NO: 10640 - protein, 17 aa, Artificial Sequence
  Synthetically generated peptide
  VARIANT (1)..(17): Xaa = Any Amino Acid
ACEXFCAXNXXPACTGC

SEQ ID NO: 10641 - protein, 17 aa, Artificial Sequence
  Synthetically generated peptide
  VARIANT (1)..(17): Xaa = Any Amino Acid
ACEXFCAXNXPXACTGC

SEQ ID NO: 10642 - protein, 17 aa, Artificial Sequence
  Synthetically generated peptide
  VARIANT (1)..(17): Xaa = Any Amino Acid
ACEXFCAXNXPAXCTGC

SEQ ID NO: 10643 - protein, 17 aa, Artificial Sequence
  Synthetically generated peptide
  VARIANT (1)..(17): Xaa = Any Amino Acid
ACEXFCAXNXPACXTGC

SEQ ID NO: 10644 - protein, 17 aa, Artificial Sequence
  Synthetically generated peptide
  VARIANT (1)..(17): Xaa = Any Amino Acid
ACEXFCAXNXPACTXGC

SEQ ID NO: 10645 - protein, 17 aa, Artificial Sequence
  Synthetically generated peptide
  VARIANT (1)..(17): Xaa = Any Amino Acid
ACEXFCAXNXPACTGXC

SEQ ID NO: 10646 - protein, 16 aa, Artificial Sequence
  Synthetically generated peptide
  VARIANT (1)..(16): Xaa = Any Amino Acid
ACEXFCAXNPXACTGC

SEQ ID NO: 10647 - protein, 17 aa, Artificial Sequence
  Synthetically generated peptide
  VARIANT (1)..(17): Xaa = Any Amino Acid
ACEXFCAXNPXXACTGC

SEQ ID NO: 10648 - protein, 17 aa, Artificial Sequence
  Synthetically generated peptide
  VARIANT (1)..(17): Xaa = Any Amino Acid
ACEXFCAXNPXAXCTGC

SEQ ID NO: 10649 - protein, 17 aa, Artificial Sequence
  Synthetically generated peptide
  VARIANT (1)..(17): Xaa = Any Amino Acid
ACEXFCAXNPXACXTGC

SEQ ID NO: 10650 - protein, 17 aa, Artificial Sequence
  Synthetically generated peptide
  VARIANT (1)..(17): Xaa = Any Amino Acid
ACEXFCAXNPXACTXGC

SEQ ID NO: 10651 - protein, 17 aa, Artificial Sequence
  Synthetically generated peptide
  VARIANT (1)..(17): Xaa = Any Amino Acid
ACEXFCAXNPXACTGXC

SEQ ID NO: 10652 - protein, 16 aa, Artificial Sequence
  Synthetically generated peptide
  VARIANT (1)..(16): Xaa = Any Amino Acid
ACEXFCAXNPAXCTGC

SEQ ID NO: 10653 - protein, 17 aa, Artificial Sequence
  Synthetically generated peptide
  VARIANT (1)..(17): Xaa = Any Amino Acid
ACEXFCAXNPAXXCTGC

SEQ ID NO: 10654 - protein, 17 aa, Artificial Sequence
  Synthetically generated peptide
  VARIANT (1)..(17): Xaa = Any Amino Acid
ACEXFCAXNPAXCXTGC

SEQ ID NO: 10655 - protein, 17 aa, Artificial Sequence
  Synthetically generated peptide
  VARIANT (1)..(17): Xaa = Any Amino Acid
ACEXFCAXNPAXCTXGC

SEQ ID NO: 10656 - protein, 17 aa, Artificial Sequence
  Synthetically generated peptide
  VARIANT (1)..(17): Xaa = Any Amino Acid
ACEXFCAXNPAXCTGXC

SEQ ID NO: 10657 - protein, 16 aa, Artificial Sequence
  Synthetically generated peptide
  VARIANT (1)..(16): Xaa = Any Amino Acid
ACEXFCAXNPACXTGC

SEQ ID NO: 10658 - protein, 17 aa, Artificial Sequence
  Synthetically generated peptide
  VARIANT (1)..(17): Xaa = Any Amino Acid
ACEXFCAXNPACXXTGC

SEQ ID NO: 10659 - protein, 17 aa, Artificial Sequence
  Synthetically generated peptide
  VARIANT (1)..(17): Xaa = Any Amino Acid
ACEXFCAXNPACXTXGC

SEQ ID NO: 10660 - protein, 17 aa, Artificial Sequence
  Synthetically generated peptide
  VARIANT (1)..(17): Xaa = Any Amino Acid
ACEXFCAXNPACXTGXC

SEQ ID NO: 10661 - protein, 16 aa, Artificial Sequence
  Synthetically generated peptide
  VARIANT (1)..(16): Xaa = Any Amino Acid
ACEXFCAXNPACTXGC

SEQ ID NO: 10662 - protein, 17 aa, Artificial Sequence
  Synthetically generated peptide
  VARIANT (1)..(17): Xaa = Any Amino Acid
ACEXFCAXNPACTXXGC

SEQ ID NO: 10663 - protein, 17 aa, Artificial Sequence
  Synthetically generated peptide
  VARIANT (1)..(17): Xaa = Any Amino Acid
ACEXFCAXNPACTXGXC

SEQ ID NO: 10664 - protein, 16 aa, Artificial Sequence
  Synthetically generated peptide
  VARIANT (1)..(16): Xaa = Any Amino Acid
ACEXFCAXNPACTGXC

SEQ ID NO: 10665 - protein, 17 aa, Artificial Sequence
  Synthetically generated peptide
  VARIANT (1)..(17): Xaa = Any Amino Acid
ACEXFCAXNPACTGXXC

SEQ ID NO: 10666 - protein, 15 aa, Artificial Sequence
  Synthetically generated peptide
  VARIANT (1)..(15): Xaa = Any Amino Acid
ACEXFCANXPACTGC

SEQ ID NO: 10667 - protein, 16 aa, Artificial Sequence
  Synthetically generated peptide
  VARIANT (1)..(16): Xaa = Any Amino Acid
ACEXFCANXXPACTGC

SEQ ID NO: 10668 - protein, 17 aa, Artificial Sequence
  Synthetically generated peptide
  VARIANT (1)..(17): Xaa = Any Amino Acid
ACEXFCANXXXPACTGC

SEQ ID NO: 10669 - protein, 17 aa, Artificial Sequence
  Synthetically generated peptide
  VARIANT (1)..(17): Xaa = Any Amino Acid
ACEXFCANXXPXACTGC

SEQ ID NO: 10670 - protein, 17 aa, Artificial Sequence
  Synthetically generated peptide
  VARIANT (1)..(17): Xaa = Any Amino Acid
ACEXFCANXXPAXCTGC

SEQ ID NO: 10671 - protein, 17 aa, Artificial Sequence
  Synthetically generated peptide
  VARIANT (1)..(17): Xaa = Any Amino Acid
ACEXFCANXXPACXTGC

SEQ ID NO: 10672 - protein, 17 aa, Artificial Sequence
  Synthetically generated peptide
  VARIANT (1)..(17): Xaa = Any Amino Acid
ACEXFCANXXPACTXGC

SEQ ID NO: 10673 - protein, 17 aa, Artificial Sequence
  Synthetically generated peptide
  VARIANT (1)..(17): Xaa = Any Amino Acid
ACEXFCANXXPACTGXC

SEQ ID NO: 10674 - protein, 16 aa, Artificial Sequence
  Synthetically generated peptide
  VARIANT (1)..(16): Xaa = Any Amino Acid
ACEXFCANXPXACTGC

SEQ ID NO: 10675 - protein, 17 aa, Artificial Sequence
  Synthetically generated peptide
  VARIANT (1)..(17): Xaa = Any Amino Acid
ACEXFCANXPXXACTGC

SEQ ID NO: 10676 - protein, 17 aa, Artificial Sequence
  Synthetically generated peptide
  VARIANT (1)..(17): Xaa = Any Amino Acid
ACEXFCANXPXAXCTGC

SEQ ID NO: 10677 - protein, 17 aa, Artificial Sequence
  Synthetically generated peptide
  VARIANT (1)..(17): Xaa = Any Amino Acid
ACEXFCANXPXACXTGC

SEQ ID NO: 10678 - protein, 17 aa, Artificial Sequence
  Synthetically generated peptide
  VARIANT (1)..(17): Xaa = Any Amino Acid
ACEXFCANXPXACTXGC

SEQ ID NO: 10679 - protein, 17 aa, Artificial Sequence
  Synthetically generated peptide
  VARIANT (1)..(17): Xaa = Any Amino Acid
ACEXFCANXPXACTGXC

SEQ ID NO: 10680 - protein, 16 aa, Artificial Sequence
  Synthetically generated peptide
  VARIANT (1)..(16): Xaa = Any Amino Acid
ACEXFCANXPAXCTGC

SEQ ID NO: 10681 - protein, 17 aa, Artificial Sequence
  Synthetically generated peptide
  VARIANT (1)..(17): Xaa = Any Amino Acid
ACEXFCANXPAXXCTGC

SEQ ID NO: 10682 - protein, 17 aa, Artificial Sequence
  Synthetically generated peptide
  VARIANT (1)..(17): Xaa = Any Amino Acid
ACEXFCANXPAXCXTGC

SEQ ID NO: 10683 - protein, 17 aa, Artificial Sequence
  Synthetically generated peptide
  VARIANT (1)..(17): Xaa = Any Amino Acid
ACEXFCANXPAXCTXGC

SEQ ID NO: 10684 - protein, 17 aa, Artificial Sequence
  Synthetically generated peptide
  VARIANT (1)..(17): Xaa = Any Amino Acid
ACEXFCANXPAXCTGXC

SEQ ID NO: 10685 - protein, 16 aa, Artificial Sequence
  Synthetically generated peptide
  VARIANT (1)..(16): Xaa = Any Amino Acid
ACEXFCANXPACXTGC

SEQ ID NO: 10686 - protein, 17 aa, Artificial Sequence
  Synthetically generated peptide
  VARIANT (1)..(17): Xaa = Any Amino Acid
ACEXFCANXPACXXTGC

SEQ ID NO: 10687 - protein, 17 aa, Artificial Sequence
  Synthetically generated peptide
  VARIANT (1)..(17): Xaa = Any Amino Acid
ACEXFCANXPACXTXGC

SEQ ID NO: 10688 - protein, 17 aa, Artificial Sequence
  Synthetically generated peptide
  VARIANT (1)..(17): Xaa = Any Amino Acid
ACEXFCANXPACXTGXC

SEQ ID NO: 10689 - protein, 16 aa, Artificial Sequence
  Synthetically generated peptide
  VARIANT (1)..(16): Xaa = Any Amino Acid
ACEXFCANXPACTXGC

SEQ ID NO: 10690 - protein, 17 aa, Artificial Sequence
  Synthetically generated peptide
  VARIANT (1)..(17): Xaa = Any Amino Acid
ACEXFCANXPACTXXGC

SEQ ID NO: 10691 - protein, 17 aa, Artificial Sequence
  Synthetically generated peptide
  VARIANT (1)..(17): Xaa = Any Amino Acid
ACEXFCANXPACTXGXC

SEQ ID NO: 10692 - protein, 16 aa, Artificial Sequence
  Synthetically generated peptide
  VARIANT (1)..(16): Xaa = Any Amino Acid
ACEXFCANXPACTGXC

SEQ ID NO: 10693 - protein, 17 aa, Artificial Sequence
  Synthetically generated peptide
  VARIANT (1)..(17): Xaa = Any Amino Acid
ACEXFCANXPACTGXXC

SEQ ID NO: 10694 - protein, 15 aa, Artificial Sequence
  Synthetically generated peptide
  VARIANT (1)..(15): Xaa = Any Amino Acid
ACEXFCANPXACTGC

SEQ ID NO: 10695 - protein, 16 aa, Artificial Sequence
  Synthetically generated peptide
  VARIANT (1)..(16): Xaa = Any Amino Acid
ACEXFCANPXXACTGC

SEQ ID NO: 10696 - protein, 17 aa, Artificial Sequence
  Synthetically generated peptide
  VARIANT (1)..(17): Xaa = Any Amino Acid
ACEXFCANPXXXACTGC

SEQ ID NO: 10697 - protein, 17 aa, Artificial Sequence
  Synthetically generated peptide
  VARIANT (1)..(17): Xaa = Any Amino Acid
ACEXFCANPXXAXCTGC

SEQ ID NO: 10698 - protein, 17 aa, Artificial Sequence
  Synthetically generated peptide
  VARIANT (1)..(17): Xaa = Any Amino Acid
ACEXFCANPXXACXTGC

SEQ ID NO: 10699 - protein, 17 aa, Artificial Sequence
  Synthetically generated peptide
  VARIANT (1)..(17): Xaa = Any Amino Acid
ACEXFCANPXXACTXGC

SEQ ID NO: 10700 - protein, 17 aa, Artificial Sequence
  Synthetically generated peptide
  VARIANT (1)..(17): Xaa = Any Amino Acid
ACEXFCANPXXACTGXC

SEQ ID NO: 10701 - protein, 16 aa, Artificial Sequence
  Synthetically generated peptide
  VARIANT (1)..(16): Xaa = Any Amino Acid
ACEXFCANPXAXCTGC

SEQ ID NO: 10702 - protein, 17 aa, Artificial Sequence
  Synthetically generated peptide
  VARIANT (1)..(17): Xaa = Any Amino Acid
ACEXFCANPXAXXCTGC

SEQ ID NO: 10703 - protein, 17 aa, Artificial Sequence
  Synthetically generated peptide
  VARIANT (1)..(17): Xaa = Any Amino Acid
ACEXFCANPXAXCXTGC

SEQ ID NO: 10704 - protein, 17 aa, Artificial Sequence
  Synthetically generated peptide
  VARIANT (1)..(17): Xaa = Any Amino Acid
ACEXFCANPXAXCTXGC

SEQ ID NO: 10705 - protein, 17 aa, Artificial Sequence
  Synthetically generated peptide
  VARIANT (1)..(17): Xaa = Any Amino Acid
ACEXFCANPXAXCTGXC

SEQ ID NO: 10706 - protein, 16 aa, Artificial Sequence
  Synthetically generated peptide
  VARIANT (1)..(16): Xaa = Any Amino Acid
ACEXFCANPXACXTGC

SEQ ID NO: 10707 - protein, 17 aa, Artificial Sequence
  Synthetically generated peptide
  VARIANT (1)..(17): Xaa = Any Amino Acid
ACEXFCANPXACXXTGC

SEQ ID NO: 10708 - protein, 17 aa, Artificial Sequence
  Synthetically generated peptide
  VARIANT (1)..(17): Xaa = Any Amino Acid
ACEXFCANPXACXTXGC

SEQ ID NO: 10709 - protein, 17 aa, Artificial Sequence
  Synthetically generated peptide
  VARIANT (1)..(17): Xaa = Any Amino Acid
ACEXFCANPXACXTGXC

SEQ ID NO: 10710 - protein, 16 aa, Artificial Sequence
  Synthetically generated peptide
  VARIANT (1)..(16): Xaa = Any Amino Acid
ACEXFCANPXACTXGC

SEQ ID NO: 10711 - protein, 17 aa, Artificial Sequence
  Synthetically generated peptide
  VARIANT (1)..(17): Xaa = Any Amino Acid
ACEXFCANPXACTXXGC

SEQ ID NO: 10712 - protein, 17 aa, Artificial Sequence
  Synthetically generated peptide
  VARIANT (1)..(17): Xaa = Any Amino Acid
ACEXFCANPXACTXGXC

SEQ ID NO: 10713 - protein, 16 aa, Artificial Sequence
  Synthetically generated peptide
  VARIANT (1)..(16): Xaa = Any Amino Acid
ACEXFCANPXACTGXC

SEQ ID NO: 10714 - protein, 17 aa, Artificial Sequence
  Synthetically generated peptide
  VARIANT (1)..(17): Xaa = Any Amino Acid
ACEXFCANPXACTGXXC

SEQ ID NO: 10715 - protein, 15 aa, Artificial Sequence
  Synthetically generated peptide
  VARIANT (1)..(15): Xaa = Any Amino Acid
ACEXFCANPAXCTGC

SEQ ID NO: 10716 - protein, 16 aa, Artificial Sequence
  Synthetically generated peptide
  VARIANT (1)..(16): Xaa = Any Amino Acid
ACEXFCANPAXXCTGC

SEQ ID NO: 10717 - protein, 17 aa, Artificial Sequence
  Synthetically generated peptide
  VARIANT (1)..(17): Xaa = Any Amino Acid
ACEXFCANPAXXXCTGC

SEQ ID NO: 10718 - protein, 17 aa, Artificial Sequence
  Synthetically generated peptide
  VARIANT (1)..(17): Xaa = Any Amino Acid
ACEXFCANPAXXCXTGC

SEQ ID NO: 10719 - protein, 17 aa, Artificial Sequence
  Synthetically generated peptide
  VARIANT (1)..(17): Xaa = Any Amino Acid
ACEXFCANPAXXCTXGC

SEQ ID NO: 10720 - protein, 17 aa, Artificial Sequence
  Synthetically generated peptide
  VARIANT (1)..(17): Xaa = Any Amino Acid
ACEXFCANPAXXCTGXC

SEQ ID NO: 10721 - protein, 16 aa, Artificial Sequence
  Synthetically generated peptide
  VARIANT (1)..(16): Xaa = Any Amino Acid
ACEXFCANPAXCXTGC

SEQ ID NO: 10722 - protein, 17 aa, Artificial Sequence
  Synthetically generated peptide
  VARIANT (1)..(17): Xaa = Any Amino Acid
ACEXFCANPAXCXXTGC

SEQ ID NO: 10723 - protein, 17 aa, Artificial Sequence
  Synthetically generated peptide
  VARIANT (1)..(17): Xaa = Any Amino Acid
ACEXFCANPAXCXTXGC

SEQ ID NO: 10724 - protein, 17 aa, Artificial Sequence
  Synthetically generated peptide
  VARIANT (1)..(17): Xaa = Any Amino Acid
ACEXFCANPAXCXTGXC

SEQ ID NO: 10725 - protein, 16 aa, Artificial Sequence
  Synthetically generated peptide
  VARIANT (1)..(16): Xaa = Any Amino Acid
ACEXFCANPAXCTXGC

SEQ ID NO: 10726 - protein, 17 aa, Artificial Sequence
  Synthetically generated peptide
  VARIANT (1)..(17): Xaa = Any Amino Acid
ACEXFCANPAXCTXXGC

SEQ ID NO: 10727 - protein, 17 aa, Artificial Sequence
  Synthetically generated peptide
  VARIANT (1)..(17): Xaa = Any Amino Acid
ACEXFCANPAXCTXGXC

SEQ ID NO: 10728 - protein, 16 aa, Artificial Sequence
  Synthetically generated peptide
  VARIANT (1)..(16): Xaa = Any Amino Acid
ACEXFCANPAXCTGXC

SEQ ID NO: 10729 - protein, 17 aa, Artificial Sequence
  Synthetically generated peptide
  VARIANT (1)..(17): Xaa = Any Amino Acid
ACEXFCANPAXCTGXXC

SEQ ID NO: 10730 - protein, 15 aa, Artificial Sequence
  Synthetically generated peptide
  VARIANT (1)..(15): Xaa = Any Amino Acid
ACEXFCANPACXTGC

SEQ ID NO: 10731 - protein, 16 aa, Artificial Sequence
  Synthetically generated peptide
  VARIANT (1)..(16): Xaa = Any Amino Acid
ACEXFCANPACXXTGC

SEQ ID NO: 10732 - protein, 17 aa, Artificial Sequence
  Synthetically generated peptide
  VARIANT (1)..(17): Xaa = Any Amino Acid
ACEXFCANPACXXXTGC

SEQ ID NO: 10733 - protein, 17 aa, Artificial Sequence
  Synthetically generated peptide
  VARIANT (1)..(17): Xaa = Any Amino Acid
ACEXFCANPACXXTXGC

SEQ ID NO: 10734 - protein, 17 aa, Artificial Sequence
  Synthetically generated peptide
  VARIANT (1)..(17): Xaa = Any Amino Acid
ACEXFCANPACXXTGXC

SEQ ID NO: 10735 - protein, 16 aa, Artificial Sequence
  Synthetically generated peptide
  VARIANT (1)..(16): Xaa = Any Amino Acid
ACEXFCANPACXTXGC

SEQ ID NO: 10736 - protein, 17 aa, Artificial Sequence
  Synthetically generated peptide
  VARIANT (1)..(17): Xaa = Any Amino Acid
ACEXFCANPACXTXXGC

SEQ ID NO: 10737 - protein, 17 aa, Artificial Sequence
  Synthetically generated peptide
  VARIANT (1)..(17): Xaa = Any Amino Acid
ACEXFCANPACXTXGXC

SEQ ID NO: 10738 - protein, 16 aa, Artificial Sequence
  Synthetically generated peptide
  VARIANT (1)..(16): Xaa = Any Amino Acid
ACEXFCANPACXTGXC

SEQ ID NO: 10739 - protein, 17 aa, Artificial Sequence
  Synthetically generated peptide
  VARIANT (1)..(17): Xaa = Any Amino Acid
ACEXFCANPACXTGXXC

SEQ ID NO: 10740 - protein, 15 aa, Artificial Sequence
  Synthetically generated peptide
  VARIANT (1)..(15): Xaa = Any Amino Acid
ACEXFCANPACTXGC

SEQ ID NO: 10741 - protein, 16 aa, Artificial Sequence
  Synthetically generated peptide
  VARIANT (1)..(16): Xaa = Any Amino Acid
ACEXFCANPACTXXGC

SEQ ID NO: 10742 - protein, 17 aa, Artificial Sequence
  Synthetically generated peptide
  VARIANT (1)..(17): Xaa = Any Amino Acid
ACEXFCANPACTXXXGC

SEQ ID NO: 10743 - protein, 17 aa, Artificial Sequence
  Synthetically generated peptide
  VARIANT (1)..(17): Xaa = Any Amino Acid
ACEXFCANPACTXXGXC

SEQ ID NO: 10744 - protein, 16 aa, Artificial Sequence
  Synthetically generated peptide
  VARIANT (1)..(16): Xaa = Any Amino Acid
ACEXFCANPACTXGXC

SEQ ID NO: 10745 - protein, 17 aa, Artificial Sequence
  Synthetically generated peptide
  VARIANT (1)..(17): Xaa = Any Amino Acid
ACEXFCANPACTXGXXC

SEQ ID NO: 10746 - protein, 15 aa, Artificial Sequence
  Synthetically generated peptide
  VARIANT (1)..(15): Xaa = Any Amino Acid
ACEXFCANPACTGXC

SEQ ID NO: 10747 - protein, 16 aa, Artificial Sequence
  Synthetically generated peptide
  VARIANT (1)..(16): Xaa = Any Amino Acid
ACEXFCANPACTGXXC

SEQ ID NO: 10748 - protein, 17 aa, Artificial Sequence
  Synthetically generated peptide
  VARIANT (1)..(17): Xaa = Any Amino Acid
ACEXFCANPACTGXXXC

SEQ ID NO: 10749 - protein, 14 aa, Artificial Sequence
  Synthetically generated peptide
  VARIANT (1)..(14): Xaa = Any Amino Acid
ACEFXCANPACTGC

SEQ ID NO: 10750 - protein, 15 aa, Artificial Sequence
  Synthetically generated peptide
  VARIANT (1)..(15): Xaa = Any Amino Acid
ACEFXXCANPACTGC

SEQ ID NO: 10751 - protein, 16 aa, Artificial Sequence
  Synthetically generated peptide
  VARIANT (1)..(16): Xaa = Any Amino Acid
ACEFXXXCANPACTGC

SEQ ID NO: 10752 - protein, 17 aa, Artificial Sequence
  Synthetically generated peptide
  VARIANT (1)..(17): Xaa = Any Amino Acid
ACEFXXXXCANPACTGC

SEQ ID NO: 10753 - protein, 17 aa, Artificial Sequence
  Synthetically generated peptide
  VARIANT (1)..(17): Xaa = Any Amino Acid
ACEFXXXCAXNPACTGC

SEQ ID NO: 10754 - protein, 17 aa, Artificial Sequence
  Synthetically generated peptide
  VARIANT (1)..(17): Xaa = Any Amino Acid
ACEFXXXCANXPACTGC

SEQ ID NO: 10755 - protein, 17 aa, Artificial Sequence
  Synthetically generated peptide
  VARIANT (1)..(17): Xaa = Any Amino Acid
ACEFXXXCANPXACTGC

SEQ ID NO: 10756 - protein, 17 aa, Artificial Sequence
  Synthetically generated peptide
  VARIANT (1)..(17): Xaa = Any Amino Acid
ACEFXXXCANPAXCTGC

SEQ ID NO: 10757 - protein, 17 aa, Artificial Sequence
  Synthetically generated peptide
  VARIANT (1)..(17): Xaa = Any Amino Acid
ACEFXXXCANPACXTGC

SEQ ID NO: 10758 - protein, 17 aa, Artificial Sequence
  Synthetically generated peptide
  VARIANT (1)..(17): Xaa = Any Amino Acid
ACEFXXXCANPACTXGC

SEQ ID NO: 10759 - protein, 17 aa, Artificial Sequence
  Synthetically generated peptide
  VARIANT (1)..(17): Xaa = Any Amino Acid
ACEFXXXCANPACTGXC

SEQ ID NO: 10760 - protein, 16 aa, Artificial Sequence
  Synthetically generated peptide
  VARIANT (1)..(16): Xaa = Any Amino Acid
ACEFXXCAXNPACTGC

SEQ ID NO: 10761 - protein, 17 aa, Artificial Sequence
  Synthetically generated peptide
  VARIANT (1)..(17): Xaa = Any Amino Acid
ACEFXXCAXXNPACTGC

SEQ ID NO: 10762 - protein, 17 aa, Artificial Sequence
  Synthetically generated peptide
  VARIANT (1)..(17): Xaa = Any Amino Acid
ACEFXXCAXNXPACTGC

SEQ ID NO: 10763 - protein, 17 aa, Artificial Sequence
  Synthetically generated peptide
  VARIANT (1)..(17): Xaa = Any Amino Acid
ACEFXXCAXNPXACTGC

SEQ ID NO: 10764 - protein, 17 aa, Artificial Sequence
  Synthetically generated peptide
  VARIANT (1)..(17): Xaa = Any Amino Acid
ACEFXXCAXNPAXCTGC

SEQ ID NO: 10765 - protein, 17 aa, Artificial Sequence
  Synthetically generated peptide
  VARIANT (1)..(17): Xaa = Any Amino Acid
ACEFXXCAXNPACXTGC

SEQ ID NO: 10766 - protein, 17 aa, Artificial Sequence
  Synthetically generated peptide
  VARIANT (1)..(17): Xaa = Any Amino Acid
ACEFXXCAXNPACTXGC

SEQ ID NO: 10767 - protein, 17 aa, Artificial Sequence
  Synthetically generated peptide
  VARIANT (1)..(17): Xaa = Any Amino Acid
ACEFXXCAXNPACTGXC

SEQ ID NO: 10768 - protein, 16 aa, Artificial Sequence
  Synthetically generated peptide
  VARIANT (1)..(16): Xaa = Any Amino Acid
ACEFXXCANXPACTGC

SEQ ID NO: 10769 - protein, 17 aa, Artificial Sequence
  Synthetically generated peptide
  VARIANT (1)..(17): Xaa = Any Amino Acid
ACEFXXCANXXPACTGC

SEQ ID NO: 10770 - protein, 17 aa, Artificial Sequence
  Synthetically generated peptide
  VARIANT (1)..(17): Xaa = Any Amino Acid
ACEFXXCANXPXACTGC

SEQ ID NO: 10771 - protein, 17 aa, Artificial Sequence
  Synthetically generated peptide
  VARIANT (1)..(17): Xaa = Any Amino Acid
ACEFXXCANXPAXCTGC

SEQ ID NO: 10772 - protein, 17 aa, Artificial Sequence
  Synthetically generated peptide
  VARIANT (1)..(17): Xaa = Any Amino Acid
ACEFXXCANXPACXTGC

SEQ ID NO: 10773 - protein, 17 aa, Artificial Sequence
  Synthetically generated peptide
  VARIANT (1)..(17): Xaa = Any Amino Acid
ACEFXXCANXPACTXGC

SEQ ID NO: 10774 - protein, 17 aa, Artificial Sequence
  Synthetically generated peptide
  VARIANT (1)..(17): Xaa = Any Amino Acid
ACEFXXCANXPACTGXC

SEQ ID NO: 10775 - protein, 16 aa, Artificial Sequence
  Synthetically generated peptide
  VARIANT (1)..(16): Xaa = Any Amino Acid
ACEFXXCANPXACTGC

SEQ ID NO: 10776 - protein, 17 aa, Artificial Sequence
  Synthetically generated peptide
  VARIANT (1)..(17): Xaa = Any Amino Acid
ACEFXXCANPXXACTGC

SEQ ID NO: 10777 - protein, 17 aa, Artificial Sequence
  Synthetically generated peptide
  VARIANT (1)..(17): Xaa = Any Amino Acid
ACEFXXCANPXAXCTGC

SEQ ID NO: 10778 - protein, 17 aa, Artificial Sequence
  Synthetically generated peptide
  VARIANT (1)..(17): Xaa = Any Amino Acid
ACEFXXCANPXACXTGC

SEQ ID NO: 10779 - protein, 17 aa, Artificial Sequence
  Synthetically generated peptide
  VARIANT (1)..(17): Xaa = Any Amino Acid
ACEFXXCANPXACTXGC

SEQ ID NO: 10780 - protein, 17 aa, Artificial Sequence
  Synthetically generated peptide
  VARIANT (1)..(17): Xaa = Any Amino Acid
ACEFXXCANPXACTGXC

SEQ ID NO: 10781 - protein, 16 aa, Artificial Sequence
  Synthetically generated peptide
  VARIANT (1)..(16): Xaa = Any Amino Acid
ACEFXXCANPAXCTGC

SEQ ID NO: 10782 - protein, 17 aa, Artificial Sequence
  Synthetically generated peptide
  VARIANT (1)..(17): Xaa = Any Amino Acid
ACEFXXCANPAXXCTGC

SEQ ID NO: 10783 - protein, 17 aa, Artificial Sequence
  Synthetically generated peptide
  VARIANT (1)..(17): Xaa = Any Amino Acid
ACEFXXCANPAXCXTGC

SEQ ID NO: 10784 - protein, 17 aa, Artificial Sequence
  Synthetically generated peptide
  VARIANT (1)..(17): Xaa = Any Amino Acid
ACEFXXCANPAXCTXGC

SEQ ID NO: 10785 - protein, 17 aa, Artificial Sequence
  Synthetically generated peptide
  VARIANT (1)..(17): Xaa = Any Amino Acid
ACEFXXCANPAXCTGXC

SEQ ID NO: 10786 - protein, 16 aa, Artificial Sequence
  Synthetically generated peptide
  VARIANT (1)..(16): Xaa = Any Amino Acid
ACEFXXCANPACXTGC

SEQ ID NO: 10787 - protein, 17 aa, Artificial Sequence
  Synthetically generated peptide
  VARIANT (1)..(17): Xaa = Any Amino Acid
ACEFXXCANPACXXTGC

SEQ ID NO: 10788 - protein, 17 aa, Artificial Sequence
  Synthetically generated peptide
  VARIANT (1)..(17): Xaa = Any Amino Acid
ACEFXXCANPACXTXGC

SEQ ID NO: 10789 - protein, 17 aa, Artificial Sequence
  Synthetically generated peptide
  VARIANT (1)..(17): Xaa = Any Amino Acid
ACEFXXCANPACXTGXC

SEQ ID NO: 10790 - protein, 16 aa, Artificial Sequence
  Synthetically generated peptide
  VARIANT (1)..(16): Xaa = Any Amino Acid
ACEFXXCANPACTXGC

SEQ ID NO: 10791 - protein, 17 aa, Artificial Sequence
  Synthetically generated peptide
  VARIANT (1)..(17): Xaa = Any Amino Acid
ACEFXXCANPACTXXGC

SEQ ID NO: 10792 - protein, 17 aa, Artificial Sequence
  Synthetically generated peptide
  VARIANT (1)..(17): Xaa = Any Amino Acid
ACEFXXCANPACTXGXC

SEQ ID NO: 10793 - protein, 16 aa, Artificial Sequence
  Synthetically generated peptide
  VARIANT (1)..(16): Xaa = Any Amino Acid
ACEFXXCANPACTGXC

SEQ ID NO: 10794 - protein, 17 aa, Artificial Sequence
  Synthetically generated peptide
  VARIANT (1)..(17): Xaa = Any Amino Acid
ACEFXXCANPACTGXXC

SEQ ID NO: 10795 - protein, 15 aa, Artificial Sequence
  Synthetically generated peptide
  VARIANT (1)..(15): Xaa = Any Amino Acid
ACEFXCAXNPACTGC

SEQ ID NO: 10796 - protein, 16 aa, Artificial Sequence
  Synthetically generated peptide
  VARIANT (1)..(16): Xaa = Any Amino Acid
ACEFXCAXXNPACTGC

SEQ ID NO: 10797 - protein, 17 aa, Artificial Sequence
  Synthetically generated peptide
  VARIANT (1)..(17): Xaa = Any Amino Acid
ACEFXCAXXXNPACTGC

SEQ ID NO: 10798 - protein, 17 aa, Artificial Sequence
  Synthetically generated peptide
  VARIANT (1)..(17): Xaa = Any Amino Acid
ACEFXCAXXNXPACTGC

SEQ ID NO: 10799 - protein, 17 aa, Artificial Sequence
  Synthetically generated peptide
  VARIANT (1)..(17): Xaa = Any Amino Acid
ACEFXCAXXNPXACTGC

SEQ ID NO: 10800 - protein, 17 aa, Artificial Sequence
  Synthetically generated peptide
  VARIANT (1)..(17): Xaa = Any Amino Acid
ACEFXCAXXNPAXCTGC

SEQ ID NO: 10801 - protein, 17 aa, Artificial Sequence
  Synthetically generated peptide
  VARIANT (1)..(17): Xaa = Any Amino Acid
ACEFXCAXXNPACXTGC

SEQ ID NO: 10802 - protein, 17 aa, Artificial Sequence
  Synthetically generated peptide
  VARIANT (1)..(17): Xaa = Any Amino Acid
ACEFXCAXXNPACTXGC

SEQ ID NO: 10803 - protein, 17 aa, Artificial Sequence
  Synthetically generated peptide
  VARIANT (1)..(17): Xaa = Any Amino Acid
ACEFXCAXXNPACTGXC

SEQ ID NO: 10804 - protein, 16 aa, Artificial Sequence
  Synthetically generated peptide
  VARIANT (1)..(16): Xaa = Any Amino Acid
ACEFXCAXNXPACTGC

SEQ ID NO: 10805 - protein, 17 aa, Artificial Sequence
  Synthetically generated peptide
  VARIANT (1)..(17): Xaa = Any Amino Acid
ACEFXCAXNXXPACTGC

SEQ ID NO: 10806 - protein, 17 aa, Artificial Sequence
  Synthetically generated peptide
  VARIANT (1)..(17): Xaa = Any Amino Acid
ACEFXCAXNXPXACTGC

SEQ ID NO: 10807 - protein, 17 aa, Artificial Sequence
  Synthetically generated peptide
  VARIANT (1)..(17): Xaa = Any Amino Acid
ACEFXCAXNXPAXCTGC

SEQ ID NO: 10808 - protein, 17 aa, Artificial Sequence
  Synthetically generated peptide
  VARIANT (1)..(17): Xaa = Any Amino Acid
ACEFXCAXNXPACXTGC

SEQ ID NO: 10809 - protein, 17 aa, Artificial Sequence
  Synthetically generated peptide
  VARIANT (1)..(17): Xaa = Any Amino Acid
ACEFXCAXNXPACTXGC

SEQ ID NO: 10810 - protein, 17 aa, Artificial Sequence
  Synthetically generated peptide
  VARIANT (1)..(17): Xaa = Any Amino Acid
ACEFXCAXNXPACTGXC

SEQ ID NO: 10811 - protein, 16 aa, Artificial Sequence
  Synthetically generated peptide
  VARIANT (1)..(16): Xaa = Any Amino Acid
ACEFXCAXNPXACTGC

SEQ ID NO: 10812 - protein, 17 aa, Artificial Sequence
  Synthetically generated peptide
  VARIANT (1)..(17): Xaa = Any Amino Acid
ACEFXCAXNPXXACTGC

SEQ ID NO: 10813 - protein, 17 aa, Artificial Sequence
  Synthetically generated peptide
  VARIANT (1)..(17): Xaa = Any Amino Acid
ACEFXCAXNPXAXCTGC

SEQ ID NO: 10814 - protein, 17 aa, Artificial Sequence
  Synthetically generated peptide
  VARIANT (1)..(17): Xaa = Any Amino Acid
ACEFXCAXNPXACXTGC

SEQ ID NO: 10815 - protein, 17 aa, Artificial Sequence
  Synthetically generated peptide
  VARIANT (1)..(17): Xaa = Any Amino Acid
ACEFXCAXNPXACTXGC

SEQ ID NO: 10816 - protein, 17 aa, Artificial Sequence
  Synthetically generated peptide
  VARIANT (1)..(17): Xaa = Any Amino Acid
ACEFXCAXNPXACTGXC

SEQ ID NO: 10817 - protein, 16 aa, Artificial Sequence
  Synthetically generated peptide
  VARIANT (1)..(16): Xaa = Any Amino Acid
ACEFXCAXNPAXCTGC

SEQ ID NO: 10818 - protein, 17 aa, Artificial Sequence
  Synthetically generated peptide
  VARIANT (1)..(17): Xaa = Any Amino Acid
ACEFXCAXNPAXXCTGC

SEQ ID NO: 10819 - protein, 17 aa, Artificial Sequence
  Synthetically generated peptide
  VARIANT (1)..(17): Xaa = Any Amino Acid
ACEFXCAXNPAXCXTGC

SEQ ID NO: 10820 - protein, 17 aa, Artificial Sequence
  Synthetically generated peptide
  VARIANT (1)..(17): Xaa = Any Amino Acid
ACEFXCAXNPAXCTXGC

SEQ ID NO: 10821 - protein, 17 aa, Artificial Sequence
  Synthetically generated peptide
  VARIANT (1)..(17): Xaa = Any Amino Acid
ACEFXCAXNPAXCTGXC

SEQ ID NO: 10822 - protein, 16 aa, Artificial Sequence
  Synthetically generated peptide
  VARIANT (1)..(16): Xaa = Any Amino Acid
ACEFXCAXNPACXTGC

SEQ ID NO: 10823 - protein, 17 aa, Artificial Sequence
  Synthetically generated peptide
  VARIANT (1)..(17): Xaa = Any Amino Acid
ACEFXCAXNPACXXTGC

SEQ ID NO: 10824 - protein, 17 aa, Artificial Sequence
  Synthetically generated peptide
  VARIANT (1)..(17): Xaa = Any Amino Acid
ACEFXCAXNPACXTXGC

SEQ ID NO: 10825 - protein, 17 aa, Artificial Sequence
  Synthetically generated peptide
  VARIANT (1)..(17): Xaa = Any Amino Acid
ACEFXCAXNPACXTGXC

SEQ ID NO: 10826 - protein, 16 aa, Artificial Sequence
  Synthetically generated peptide
  VARIANT (1)..(16): Xaa = Any Amino Acid
ACEFXCAXNPACTXGC

SEQ ID NO: 10827 - protein, 17 aa, Artificial Sequence
  Synthetically generated peptide
  VARIANT (1)..(17): Xaa = Any Amino Acid
ACEFXCAXNPACTXXGC

SEQ ID NO: 10828 - protein, 17 aa, Artificial Sequence
  Synthetically generated peptide
  VARIANT (1)..(17): Xaa = Any Amino Acid
ACEFXCAXNPACTXGXC

SEQ ID NO: 10829 - protein, 16 aa, Artificial Sequence
  Synthetically generated peptide
  VARIANT (1)..(16): Xaa = Any Amino Acid
ACEFXCAXNPACTGXC

SEQ ID NO: 10830 - protein, 17 aa, Artificial Sequence
  Synthetically generated peptide
  VARIANT (1)..(17): Xaa = Any Amino Acid
ACEFXCAXNPACTGXXC

SEQ ID NO: 10831 - protein, 15 aa, Artificial Sequence
  Synthetically generated peptide
  VARIANT (1)..(15): Xaa = Any Amino Acid
ACEFXCANXPACTGC

SEQ ID NO: 10832 - protein, 16 aa, Artificial Sequence
  Synthetically generated peptide
  VARIANT (1)..(16): Xaa = Any Amino Acid
ACEFXCANXXPACTGC

SEQ ID NO: 10833 - protein, 17 aa, Artificial Sequence
  Synthetically generated peptide
  VARIANT (1)..(17): Xaa = Any Amino Acid
ACEFXCANXXXPACTGC

SEQ ID NO: 10834 - protein, 17 aa, Artificial Sequence
  Synthetically generated peptide
  VARIANT (1)..(17): Xaa = Any Amino Acid
ACEFXCANXXPXACTGC

SEQ ID NO: 10835 - protein, 17 aa, Artificial Sequence
  Synthetically generated peptide
  VARIANT (1)..(17): Xaa = Any Amino Acid
ACEFXCANXXPAXCTGC

SEQ ID NO: 10836 - protein, 17 aa, Artificial Sequence
  Synthetically generated peptide
  VARIANT (1)..(17): Xaa = Any Amino Acid
ACEFXCANXXPACXTGC

SEQ ID NO: 10837 - protein, 17 aa, Artificial Sequence
  Synthetically generated peptide
  VARIANT (1)..(17): Xaa = Any Amino Acid
ACEFXCANXXPACTXGC

SEQ ID NO: 10838 - protein, 17 aa, Artificial Sequence
  Synthetically generated peptide
  VARIANT (1)..(17): Xaa = Any Amino Acid
ACEFXCANXXPACTGXC

SEQ ID NO: 10839 - protein, 16 aa, Artificial Sequence
  Synthetically generated peptide
  VARIANT (1)..(16): Xaa = Any Amino Acid
ACEFXCANXPXACTGC

SEQ ID NO: 10840 - protein, 17 aa, Artificial Sequence
  Synthetically generated peptide
  VARIANT (1)..(17): Xaa = Any Amino Acid
ACEFXCANXPXXACTGC

SEQ ID NO: 10841 - protein, 17 aa, Artificial Sequence
  Synthetically generated peptide
  VARIANT (1)..(17): Xaa = Any Amino Acid
ACEFXCANXPXAXCTGC

SEQ ID NO: 10842 - protein, 17 aa, Artificial Sequence
  Synthetically generated peptide
  VARIANT (1)..(17): Xaa = Any Amino Acid
ACEFXCANXPXACXTGC

SEQ ID NO: 10843 - protein, 17 aa, Artificial Sequence
  Synthetically generated peptide
  VARIANT (1)..(17): Xaa = Any Amino Acid
ACEFXCANXPXACTXGC

SEQ ID NO: 10844 - protein, 17 aa, Artificial Sequence
  Synthetically generated peptide
  VARIANT (1)..(17): Xaa = Any Amino Acid
ACEFXCANXPXACTGXC

SEQ ID NO: 10845 - protein, 16 aa, Artificial Sequence
  Synthetically generated peptide
  VARIANT (1)..(16): Xaa = Any Amino Acid
ACEFXCANXPAXCTGC

SEQ ID NO: 10846 - protein, 17 aa, Artificial Sequence
  Synthetically generated peptide
  VARIANT (1)..(17): Xaa = Any Amino Acid
ACEFXCANXPAXXCTGC

SEQ ID NO: 10847 - protein, 17 aa, Artificial Sequence
  Synthetically generated peptide
  VARIANT (1)..(17): Xaa = Any Amino Acid
ACEFXCANXPAXCXTGC

SEQ ID NO: 10848 - protein, 17 aa, Artificial Sequence
  Synthetically generated peptide
  VARIANT (1)..(17): Xaa = Any Amino Acid
ACEFXCANXPAXCTXGC

SEQ ID NO: 10849 - protein, 17 aa, Artificial Sequence
  Synthetically generated peptide
  VARIANT (1)..(17): Xaa = Any Amino Acid
ACEFXCANXPAXCTGXC

SEQ ID NO: 10850 - protein, 16 aa, Artificial Sequence
  Synthetically generated peptide
  VARIANT (1)..(16): Xaa = Any Amino Acid
ACEFXCANXPACXTGC

SEQ ID NO: 10851 - protein, 17 aa, Artificial Sequence
  Synthetically generated peptide
  VARIANT (1)..(17): Xaa = Any Amino Acid
ACEFXCANXPACXXTGC

SEQ ID NO: 10852 - protein, 17 aa, Artificial Sequence
  Synthetically generated peptide
  VARIANT (1)..(17): Xaa = Any Amino Acid
ACEFXCANXPACXTXGC

SEQ ID NO: 10853 - protein, 17 aa, Artificial Sequence
  Synthetically generated peptide
  VARIANT (1)..(17): Xaa = Any Amino Acid
ACEFXCANXPACXTGXC

SEQ ID NO: 10854 - protein, 16 aa, Artificial Sequence
  Synthetically generated peptide
  VARIANT (1)..(16): Xaa = Any Amino Acid
ACEFXCANXPACTXGC

SEQ ID NO: 10855 - protein, 17 aa, Artificial Sequence
  Synthetically generated peptide
  VARIANT (1)..(17): Xaa = Any Amino Acid
ACEFXCANXPACTXXGC

SEQ ID NO: 10856 - protein, 17 aa, Artificial Sequence
  Synthetically generated peptide
  VARIANT (1)..(17): Xaa = Any Amino Acid
ACEFXCANXPACTXGXC

SEQ ID NO: 10857 - protein, 16 aa, Artificial Sequence
  Synthetically generated peptide
  VARIANT (1)..(16): Xaa = Any Amino Acid
ACEFXCANXPACTGXC

SEQ ID NO: 10858 - protein, 17 aa, Artificial Sequence
  Synthetically generated peptide
  VARIANT (1)..(17): Xaa = Any Amino Acid
ACEFXCANXPACTGXXC

SEQ ID NO: 10859 - protein, 15 aa, Artificial Sequence
  Synthetically generated peptide
  VARIANT (1)..(15): Xaa = Any Amino Acid
ACEFXCANPXACTGC

SEQ ID NO: 10860 - protein, 16 aa, Artificial Sequence
  Synthetically generated peptide
  VARIANT (1)..(16): Xaa = Any Amino Acid
ACEFXCANPXXACTGC

SEQ ID NO: 10861 - protein, 17 aa, Artificial Sequence
  Synthetically generated peptide
  VARIANT (1)..(17): Xaa = Any Amino Acid
ACEFXCANPXXXACTGC

SEQ ID NO: 10862 - protein, 17 aa, Artificial Sequence
  Synthetically generated peptide
  VARIANT (1)..(17): Xaa = Any Amino Acid
ACEFXCANPXXAXCTGC

SEQ ID NO: 10863 - protein, 17 aa, Artificial Sequence
  Synthetically generated peptide
  VARIANT (1)..(17): Xaa = Any Amino Acid
ACEFXCANPXXACXTGC

SEQ ID NO: 10864 - protein, 17 aa, Artificial Sequence
  Synthetically generated peptide
  VARIANT (1)..(17): Xaa = Any Amino Acid
ACEFXCANPXXACTXGC

SEQ ID NO: 10865 - protein, 17 aa, Artificial Sequence
  Synthetically generated peptide
  VARIANT (1)..(17): Xaa = Any Amino Acid
ACEFXCANPXXACTGXC

SEQ ID NO: 10866 - protein, 16 aa, Artificial Sequence
  Synthetically generated peptide
  VARIANT (1)..(16): Xaa = Any Amino Acid
ACEFXCANPXAXCTGC

SEQ ID NO: 10867 - protein, 17 aa, Artificial Sequence
  Synthetically generated peptide
  VARIANT (1)..(17): Xaa = Any Amino Acid
ACEFXCANPXAXXCTGC

SEQ ID NO: 10868 - protein, 17 aa, Artificial Sequence
  Synthetically generated peptide
  VARIANT (1)..(17): Xaa = Any Amino Acid
ACEFXCANPXAXCXTGC

SEQ ID NO: 10869 - protein, 17 aa, Artificial Sequence
  Synthetically generated peptide
  VARIANT (1)..(17): Xaa = Any Amino Acid
ACEFXCANPXAXCTXGC

SEQ ID NO: 10870 - protein, 17 aa, Artificial Sequence
  Synthetically generated peptide
  VARIANT (1)..(17): Xaa = Any Amino Acid
ACEFXCANPXAXCTGXC

SEQ ID NO: 10871 - protein, 16 aa, Artificial Sequence
  Synthetically generated peptide
  VARIANT (1)..(16): Xaa = Any Amino Acid
ACEFXCANPXACXTGC

SEQ ID NO: 10872 - protein, 17 aa, Artificial Sequence
  Synthetically generated peptide
  VARIANT (1)..(17): Xaa = Any Amino Acid
ACEFXCANPXACXXTGC

SEQ ID NO: 10873 - protein, 17 aa, Artificial Sequence
  Synthetically generated peptide
  VARIANT (1)..(17): Xaa = Any Amino Acid
ACEFXCANPXACXTXGC

SEQ ID NO: 10874 - protein, 17 aa, Artificial Sequence
  Synthetically generated peptide
  VARIANT (1)..(17): Xaa = Any Amino Acid
ACEFXCANPXACXTGXC

SEQ ID NO: 10875 - protein, 16 aa, Artificial Sequence
  Synthetically generated peptide
  VARIANT (1)..(16): Xaa = Any Amino Acid
ACEFXCANPXACTXGC

SEQ ID NO: 10876 - protein, 17 aa, Artificial Sequence
  Synthetically generated peptide
  VARIANT (1)..(17): Xaa = Any Amino Acid
ACEFXCANPXACTXXGC

SEQ ID NO: 10877 - protein, 17 aa, Artificial Sequence
  Synthetically generated peptide
  VARIANT (1)..(17): Xaa = Any Amino Acid
ACEFXCANPXACTXGXC

SEQ ID NO: 10878 - protein, 16 aa, Artificial Sequence
  Synthetically generated peptide
  VARIANT (1)..(16): Xaa = Any Amino Acid
ACEFXCANPXACTGXC

SEQ ID NO: 10879 - protein, 17 aa, Artificial Sequence
  Synthetically generated peptide
  VARIANT (1)..(17): Xaa = Any Amino Acid
ACEFXCANPXACTGXXC

SEQ ID NO: 10880 - protein, 15 aa, Artificial Sequence
  Synthetically generated peptide
  VARIANT (1)..(15): Xaa = Any Amino Acid
ACEFXCANPAXCTGC

SEQ ID NO: 10881 - protein, 16 aa, Artificial Sequence
  Synthetically generated peptide
  VARIANT (1)..(16): Xaa = Any Amino Acid
ACEFXCANPAXXCTGC

SEQ ID NO: 10882 - protein, 17 aa, Artificial Sequence
  Synthetically generated peptide
  VARIANT (1)..(17): Xaa = Any Amino Acid
ACEFXCANPAXXXCTGC

SEQ ID NO: 10883 - protein, 17 aa, Artificial Sequence
  Synthetically generated peptide
  VARIANT (1)..(17): Xaa = Any Amino Acid
ACEFXCANPAXXCXTGC

SEQ ID NO: 10884 - protein, 17 aa, Artificial Sequence
  Synthetically generated peptide
  VARIANT (1)..(17): Xaa = Any Amino Acid
ACEFXCANPAXXCTXGC

SEQ ID NO: 10885 - protein, 17 aa, Artificial Sequence
  Synthetically generated peptide
  VARIANT (1)..(17): Xaa = Any Amino Acid
ACEFXCANPAXXCTGXC

SEQ ID NO: 10886 - protein, 16 aa, Artificial Sequence
  Synthetically generated peptide
  VARIANT (1)..(16): Xaa = Any Amino Acid
ACEFXCANPAXCXTGC

SEQ ID NO: 10887 - protein, 17 aa, Artificial Sequence
  Synthetically generated peptide
  VARIANT (1)..(17): Xaa = Any Amino Acid
ACEFXCANPAXCXXTGC

SEQ ID NO: 10888 - protein, 17 aa, Artificial Sequence
  Synthetically generated peptide
  VARIANT (1)..(17): Xaa = Any Amino Acid
ACEFXCANPAXCXTXGC

SEQ ID NO: 10889 - protein, 17 aa, Artificial Sequence
  Synthetically generated peptide
  VARIANT (1)..(17): Xaa = Any Amino Acid
ACEFXCANPAXCXTGXC

SEQ ID NO: 10890 - protein, 16 aa, Artificial Sequence
  Synthetically generated peptide
  VARIANT (1)..(16): Xaa = Any Amino Acid
ACEFXCANPAXCTXGC

SEQ ID NO: 10891 - protein, 17 aa, Artificial Sequence
  Synthetically generated peptide
  VARIANT (1)..(17): Xaa = Any Amino Acid
ACEFXCANPAXCTXXGC

SEQ ID NO: 10892 - protein, 17 aa, Artificial Sequence
  Synthetically generated peptide
  VARIANT (1)..(17): Xaa = Any Amino Acid
ACEFXCANPAXCTXGXC

SEQ ID NO: 10893 - protein, 16 aa, Artificial Sequence
  Synthetically generated peptide
  VARIANT (1)..(16): Xaa = Any Amino Acid
ACEFXCANPAXCTGXC

SEQ ID NO: 10894 - protein, 17 aa, Artificial Sequence
  Synthetically generated peptide
  VARIANT (1)..(17): Xaa = Any Amino Acid
ACEFXCANPAXCTGXXC

SEQ ID NO: 10895 - protein, 15 aa, Artificial Sequence
  Synthetically generated peptide
  VARIANT (1)..(15): Xaa = Any Amino Acid
ACEFXCANPACXTGC

SEQ ID NO: 10896 - protein, 16 aa, Artificial Sequence
  Synthetically generated peptide
  VARIANT (1)..(16): Xaa = Any Amino Acid
ACEFXCANPACXXTGC

SEQ ID NO: 10897 - protein, 17 aa, Artificial Sequence
  Synthetically generated peptide
  VARIANT (1)..(17): Xaa = Any Amino Acid
ACEFXCANPACXXXTGC

SEQ ID NO: 10898 - protein, 17 aa, Artificial Sequence
  Synthetically generated peptide
  VARIANT (1)..(17): Xaa = Any Amino Acid
ACEFXCANPACXXTXGC

SEQ ID NO: 10899 - protein, 17 aa, Artificial Sequence
  Synthetically generated peptide
  VARIANT (1)..(17): Xaa = Any Amino Acid
ACEFXCANPACXXTGXC

SEQ ID NO: 10900 - protein, 16 aa, Artificial Sequence
  Synthetically generated peptide
  VARIANT (1)..(16): Xaa = Any Amino Acid
ACEFXCANPACXTXGC

SEQ ID NO: 10901 - protein, 17 aa, Artificial Sequence
  Synthetically generated peptide
  VARIANT (1)..(17): Xaa = Any Amino Acid
ACEFXCANPACXTXXGC

SEQ ID NO: 10902 - protein, 17 aa, Artificial Sequence
  Synthetically generated peptide
  VARIANT (1)..(17): Xaa = Any Amino Acid
ACEFXCANPACXTXGXC

SEQ ID NO: 10903 - protein, 16 aa, Artificial Sequence
  Synthetically generated peptide
  VARIANT (1)..(16): Xaa = Any Amino Acid
ACEFXCANPACXTGXC

SEQ ID NO: 10904 - protein, 17 aa, Artificial Sequence
  Synthetically generated peptide
  VARIANT (1)..(17): Xaa = Any Amino Acid
ACEFXCANPACXTGXXC

SEQ ID NO: 10905 - protein, 15 aa, Artificial Sequence
  Synthetically generated peptide
  VARIANT (1)..(15): Xaa = Any Amino Acid
ACEFXCANPACTXGC

SEQ ID NO: 10906 - protein, 16 aa, Artificial Sequence
  Synthetically generated peptide
  VARIANT (1)..(16): Xaa = Any Amino Acid
ACEFXCANPACTXXGC

SEQ ID NO: 10907 - protein, 17 aa, Artificial Sequence
  Synthetically generated peptide
  VARIANT (1)..(17): Xaa = Any Amino Acid
ACEFXCANPACTXXXGC

SEQ ID NO: 10908 - protein, 17 aa, Artificial Sequence
  Synthetically generated peptide
  VARIANT (1)..(17): Xaa = Any Amino Acid
ACEFXCANPACTXXGXC

SEQ ID NO: 10909 - protein, 16 aa, Artificial Sequence
  Synthetically generated peptide
  VARIANT (1)..(16): Xaa = Any Amino Acid
ACEFXCANPACTXGXC

SEQ ID NO: 10910 - protein, 17 aa, Artificial Sequence
  Synthetically generated peptide
  VARIANT (1)..(17): Xaa = Any Amino Acid
ACEFXCANPACTXGXXC

SEQ ID NO: 10911 - protein, 15 aa, Artificial Sequence
  Synthetically generated peptide
  VARIANT (1)..(15): Xaa = Any Amino Acid
ACEFXCANPACTGXC

SEQ ID NO: 10912 - protein, 16 aa, Artificial Sequence
  Synthetically generated peptide
  VARIANT (1)..(16): Xaa = Any Amino Acid
ACEFXCANPACTGXXC

SEQ ID NO: 10913 - protein, 17 aa, Artificial Sequence
  Synthetically generated peptide
  VARIANT (1)..(17): Xaa = Any Amino Acid
ACEFXCANPACTGXXXC

SEQ ID NO: 10914 - protein, 14 aa, Artificial Sequence
  Synthetically generated peptide
  VARIANT (1)..(14): Xaa = Any Amino Acid
ACEFCAXNPACTGC

SEQ ID NO: 10915 - protein, 15 aa, Artificial Sequence
  Synthetically generated peptide
  VARIANT (1)..(15): Xaa = Any Amino Acid
ACEFCAXXNPACTGC

SEQ ID NO: 10916 - protein, 16 aa, Artificial Sequence
  Synthetically generated peptide
  VARIANT (1)..(16): Xaa = Any Amino Acid
ACEFCAXXXNPACTGC

SEQ ID NO: 10917 - protein, 17 aa, Artificial Sequence
  Synthetically generated peptide
  VARIANT (1)..(17): Xaa = Any Amino Acid
ACEFCAXXXXNPACTGC

SEQ ID NO: 10918 - protein, 17 aa, Artificial Sequence
  Synthetically generated peptide
  VARIANT (1)..(17): Xaa = Any Amino Acid
ACEFCAXXXNXPACTGC

SEQ ID NO: 10919 - protein, 17 aa, Artificial Sequence
  Synthetically generated peptide
  VARIANT (1)..(17): Xaa = Any Amino Acid
ACEFCAXXXNPXACTGC

SEQ ID NO: 10920 - protein, 17 aa, Artificial Sequence
  Synthetically generated peptide
  VARIANT (1)..(17): Xaa = Any Amino Acid
ACEFCAXXXNPAXCTGC

SEQ ID NO: 10921 - protein, 17 aa, Artificial Sequence
  Synthetically generated peptide
  VARIANT (1)..(17): Xaa = Any Amino Acid
ACEFCAXXXNPACXTGC

SEQ ID NO: 10922 - protein, 17 aa, Artificial Sequence
  Synthetically generated peptide
  VARIANT (1)..(17): Xaa = Any Amino Acid
ACEFCAXXXNPACTXGC

SEQ ID NO: 10923 - protein, 17 aa, Artificial Sequence
  Synthetically generated peptide
  VARIANT (1)..(17): Xaa = Any Amino Acid
ACEFCAXXXNPACTGXC

SEQ ID NO: 10924 - protein, 16 aa, Artificial Sequence
  Synthetically generated peptide
  VARIANT (1)..(16): Xaa = Any Amino Acid
ACEFCAXXNXPACTGC

SEQ ID NO: 10925 - protein, 17 aa, Artificial Sequence
  Synthetically generated peptide
  VARIANT (1)..(17): Xaa = Any Amino Acid
ACEFCAXXNXXPACTGC

SEQ ID NO: 10926 - protein, 17 aa, Artificial Sequence
  Synthetically generated peptide
  VARIANT (1)..(17): Xaa = Any Amino Acid
ACEFCAXXNXPXACTGC

SEQ ID NO: 10927 - protein, 17 aa, Artificial Sequence
  Synthetically generated peptide
  VARIANT (1)..(17): Xaa = Any Amino Acid
ACEFCAXXNXPAXCTGC

SEQ ID NO: 10928 - protein, 17 aa, Artificial Sequence
  Synthetically generated peptide
  VARIANT (1)..(17): Xaa = Any Amino Acid
ACEFCAXXNXPACXTGC

SEQ ID NO: 10929 - protein, 17 aa, Artificial Sequence
  Synthetically generated peptide
  VARIANT (1)..(17): Xaa = Any Amino Acid
ACEFCAXXNXPACTXGC

SEQ ID NO: 10930 - protein, 17 aa, Artificial Sequence
  Synthetically generated peptide
  VARIANT (1)..(17): Xaa = Any Amino Acid
ACEFCAXXNXPACTGXC

SEQ ID NO: 10931 - protein, 16 aa, Artificial Sequence
  Synthetically generated peptide
  VARIANT (1)..(16): Xaa = Any Amino Acid
ACEFCAXXNPXACTGC

SEQ ID NO: 10932 - protein, 17 aa, Artificial Sequence
  Synthetically generated peptide
  VARIANT (1)..(17): Xaa = Any Amino Acid
ACEFCAXXNPXXACTGC

SEQ ID NO: 10933 - protein, 17 aa, Artificial Sequence
  Synthetically generated peptide
  VARIANT (1)..(17): Xaa = Any Amino Acid
ACEFCAXXNPXAXCTGC

SEQ ID NO: 10934 - protein, 17 aa, Artificial Sequence
  Synthetically generated peptide
  VARIANT (1)..(17): Xaa = Any Amino Acid
ACEFCAXXNPXACXTGC

SEQ ID NO: 10935 - protein, 17 aa, Artificial Sequence
  Synthetically generated peptide
  VARIANT (1)..(17): Xaa = Any Amino Acid
ACEFCAXXNPXACTXGC

SEQ ID NO: 10936 - protein, 17 aa, Artificial Sequence
  Synthetically generated peptide
  VARIANT (1)..(17): Xaa = Any Amino Acid
ACEFCAXXNPXACTGXC

SEQ ID NO: 10937 - protein, 16 aa, Artificial Sequence
  Synthetically generated peptide
  VARIANT (1)..(16): Xaa = Any Amino Acid
ACEFCAXXNPAXCTGC

SEQ ID NO: 10938 - protein, 17 aa, Artificial Sequence
  Synthetically generated peptide
  VARIANT (1)..(17): Xaa = Any Amino Acid
ACEFCAXXNPAXXCTGC

SEQ ID NO: 10939 - protein, 17 aa, Artificial Sequence
  Synthetically generated peptide
  VARIANT (1)..(17): Xaa = Any Amino Acid
ACEFCAXXNPAXCXTGC

SEQ ID NO: 10940 - protein, 17 aa, Artificial Sequence
  Synthetically generated peptide
  VARIANT (1)..(17): Xaa = Any Amino Acid
ACEFCAXXNPAXCTXGC

SEQ ID NO: 10941 - protein, 17 aa, Artificial Sequence
  Synthetically generated peptide
  VARIANT (1)..(17): Xaa = Any Amino Acid
ACEFCAXXNPAXCTGXC

SEQ ID NO: 10942 - protein, 16 aa, Artificial Sequence
  Synthetically generated peptide
  VARIANT (1)..(16): Xaa = Any Amino Acid
ACEFCAXXNPACXTGC

SEQ ID NO: 10943 - protein, 17 aa, Artificial Sequence
  Synthetically generated peptide
  VARIANT (1)..(17): Xaa = Any Amino Acid
ACEFCAXXNPACXXTGC

SEQ ID NO: 10944 - protein, 17 aa, Artificial Sequence
  Synthetically generated peptide
  VARIANT (1)..(17): Xaa = Any Amino Acid
ACEFCAXXNPACXTXGC

SEQ ID NO: 10945 - protein, 17 aa, Artificial Sequence
  Synthetically generated peptide
  VARIANT (1)..(17): Xaa = Any Amino Acid
ACEFCAXXNPACXTGXC

SEQ ID NO: 10946 - protein, 16 aa, Artificial Sequence
  Synthetically generated peptide
  VARIANT (1)..(16): Xaa = Any Amino Acid
ACEFCAXXNPACTXGC

SEQ ID NO: 10947 - protein, 17 aa, Artificial Sequence
  Synthetically generated peptide
  VARIANT (1)..(17): Xaa = Any Amino Acid
ACEFCAXXNPACTXXGC

SEQ ID NO: 10948 - protein, 17 aa, Artificial Sequence
  Synthetically generated peptide
  VARIANT (1)..(17): Xaa = Any Amino Acid
ACEFCAXXNPACTXGXC

SEQ ID NO: 10949 - protein, 16 aa, Artificial Sequence
  Synthetically generated peptide
  VARIANT (1)..(16): Xaa = Any Amino Acid
ACEFCAXXNPACTGXC

SEQ ID NO: 10950 - protein, 17 aa, Artificial Sequence
  Synthetically generated peptide
  VARIANT (1)..(17): Xaa = Any Amino Acid
ACEFCAXXNPACTGXXC

SEQ ID NO: 10951 - protein, 15 aa, Artificial Sequence
  Synthetically generated peptide
  VARIANT (1)..(15): Xaa = Any Amino Acid
ACEFCAXNXPACTGC

SEQ ID NO: 10952 - protein, 16 aa, Artificial Sequence
  Synthetically generated peptide
  VARIANT (1)..(16): Xaa = Any Amino Acid
ACEFCAXNXXPACTGC

SEQ ID NO: 10953 - protein, 17 aa, Artificial Sequence
  Synthetically generated peptide
  VARIANT (1)..(17): Xaa = Any Amino Acid
ACEFCAXNXXXPACTGC

SEQ ID NO: 10954 - protein, 17 aa, Artificial Sequence
  Synthetically generated peptide
  VARIANT (1)..(17): Xaa = Any Amino Acid
ACEFCAXNXXPXACTGC

SEQ ID NO: 10955 - protein, 17 aa, Artificial Sequence
  Synthetically generated peptide
  VARIANT (1)..(17): Xaa = Any Amino Acid
ACEFCAXNXXPAXCTGC

SEQ ID NO: 10956 - protein, 17 aa, Artificial Sequence
  Synthetically generated peptide
  VARIANT (1)..(17): Xaa = Any Amino Acid
ACEFCAXNXXPACXTGC

SEQ ID NO: 10957 - protein, 17 aa, Artificial Sequence
  Synthetically generated peptide
  VARIANT (1)..(17): Xaa = Any Amino Acid
ACEFCAXNXXPACTXGC

SEQ ID NO: 10958 - protein, 17 aa, Artificial Sequence
  Synthetically generated peptide
  VARIANT (1)..(17): Xaa = Any Amino Acid
ACEFCAXNXXPACTGXC

SEQ ID NO: 10959 - protein, 16 aa, Artificial Sequence
  Synthetically generated peptide
  VARIANT (1)..(16): Xaa = Any Amino Acid
ACEFCAXNXPXACTGC

SEQ ID NO: 10960 - protein, 17 aa, Artificial Sequence
  Synthetically generated peptide
  VARIANT (1)..(17): Xaa = Any Amino Acid
ACEFCAXNXPXXACTGC

SEQ ID NO: 10961 - protein, 17 aa, Artificial Sequence
  Synthetically generated peptide
  VARIANT (1)..(17): Xaa = Any Amino Acid
ACEFCAXNXPXAXCTGC

SEQ ID NO: 10962 - protein, 17 aa, Artificial Sequence
  Synthetically generated peptide
  VARIANT (1)..(17): Xaa = Any Amino Acid
ACEFCAXNXPXACXTGC

SEQ ID NO: 10963 - protein, 17 aa, Artificial Sequence
  Synthetically generated peptide
  VARIANT (1)..(17): Xaa = Any Amino Acid
ACEFCAXNXPXACTXGC

SEQ ID NO: 10964 - protein, 17 aa, Artificial Sequence
  Synthetically generated peptide
  VARIANT (1)..(17): Xaa = Any Amino Acid
ACEFCAXNXPXACTGXC

SEQ ID NO: 10965 - protein, 16 aa, Artificial Sequence
  Synthetically generated peptide
  VARIANT (1)..(16): Xaa = Any Amino Acid
ACEFCAXNXPAXCTGC

SEQ ID NO: 10966 - protein, 17 aa, Artificial Sequence
  Synthetically generated peptide
  VARIANT (1)..(17): Xaa = Any Amino Acid
ACEFCAXNXPAXXCTGC

SEQ ID NO: 10967 - protein, 17 aa, Artificial Sequence
  Synthetically generated peptide
  VARIANT (1)..(17): Xaa = Any Amino Acid
ACEFCAXNXPAXCXTGC

SEQ ID NO: 10968 - protein, 17 aa, Artificial Sequence
  Synthetically generated peptide
  VARIANT (1)..(17): Xaa = Any Amino Acid
ACEFCAXNXPAXCTXGC

SEQ ID NO: 10969 - protein, 17 aa, Artificial Sequence
  Synthetically generated peptide
  VARIANT (1)..(17): Xaa = Any Amino Acid
ACEFCAXNXPAXCTGXC

SEQ ID NO: 10970 - protein, 16 aa, Artificial Sequence
  Synthetically generated peptide
  VARIANT (1)..(16): Xaa = Any Amino Acid
ACEFCAXNXPACXTGC

SEQ ID NO: 10971 - protein, 17 aa, Artificial Sequence
  Synthetically generated peptide
  VARIANT (1)..(17): Xaa = Any Amino Acid
ACEFCAXNXPACXXTGC

SEQ ID NO: 10972 - protein, 17 aa, Artificial Sequence
  Synthetically generated peptide
  VARIANT (1)..(17): Xaa = Any Amino Acid
ACEFCAXNXPACXTXGC

SEQ ID NO: 10973 - protein, 17 aa, Artificial Sequence
  Synthetically generated peptide
  VARIANT (1)..(17): Xaa = Any Amino Acid
ACEFCAXNXPACXTGXC

SEQ ID NO: 10974 - protein, 16 aa, Artificial Sequence
  Synthetically generated peptide
  VARIANT (1)..(16): Xaa = Any Amino Acid
ACEFCAXNXPACTXGC

SEQ ID NO: 10975 - protein, 17 aa, Artificial Sequence
  Synthetically generated peptide
  VARIANT (1)..(17): Xaa = Any Amino Acid
ACEFCAXNXPACTXXGC

SEQ ID NO: 10976 - protein, 17 aa, Artificial Sequence
  Synthetically generated peptide
  VARIANT (1)..(17): Xaa = Any Amino Acid
ACEFCAXNXPACTXGXC

SEQ ID NO: 10977 - protein, 16 aa, Artificial Sequence
  Synthetically generated peptide
  VARIANT (1)..(16): Xaa = Any Amino Acid
ACEFCAXNXPACTGXC

SEQ ID NO: 10978 - protein, 17 aa, Artificial Sequence
  Synthetically generated peptide
  VARIANT (1)..(17): Xaa = Any Amino Acid
ACEFCAXNXPACTGXXC

SEQ ID NO: 10979 - protein, 15 aa, Artificial Sequence
  Synthetically generated peptide
  VARIANT (1)..(15): Xaa = Any Amino Acid
ACEFCAXNPXACTGC

SEQ ID NO: 10980 - protein, 16 aa, Artificial Sequence
  Synthetically generated peptide
  VARIANT (1)..(16): Xaa = Any Amino Acid
ACEFCAXNPXXACTGC

SEQ ID NO: 10981 - protein, 17 aa, Artificial Sequence
  Synthetically generated peptide
  VARIANT (1)..(17): Xaa = Any Amino Acid
ACEFCAXNPXXXACTGC

SEQ ID NO: 10982 - protein, 17 aa, Artificial Sequence
  Synthetically generated peptide
  VARIANT (1)..(17): Xaa = Any Amino Acid
ACEFCAXNPXXAXCTGC

SEQ ID NO: 10983 - protein, 17 aa, Artificial Sequence
  Synthetically generated peptide
  VARIANT (1)..(17): Xaa = Any Amino Acid
ACEFCAXNPXXACXTGC

SEQ ID NO: 10984 - protein, 17 aa, Artificial Sequence
  Synthetically generated peptide
  VARIANT (1)..(17): Xaa = Any Amino Acid
ACEFCAXNPXXACTXGC

SEQ ID NO: 10985 - protein, 17 aa, Artificial Sequence
  Synthetically generated peptide
  VARIANT (1)..(17): Xaa = Any Amino Acid
ACEFCAXNPXXACTGXC

SEQ ID NO: 10986 - protein, 16 aa, Artificial Sequence
  Synthetically generated peptide
  VARIANT (1)..(16): Xaa = Any Amino Acid
ACEFCAXNPXAXCTGC

SEQ ID NO: 10987 - protein, 17 aa, Artificial Sequence
  Synthetically generated peptide
  VARIANT (1)..(17): Xaa = Any Amino Acid
ACEFCAXNPXAXXCTGC

SEQ ID NO: 10988 - protein, 17 aa, Artificial Sequence
  Synthetically generated peptide
  VARIANT (1)..(17): Xaa = Any Amino Acid
ACEFCAXNPXAXCXTGC

SEQ ID NO: 10989 - protein, 17 aa, Artificial Sequence
  Synthetically generated peptide
  VARIANT (1)..(17): Xaa = Any Amino Acid
ACEFCAXNPXAXCTXGC

SEQ ID NO: 10990 - protein, 17 aa, Artificial Sequence
  Synthetically generated peptide
  VARIANT (1)..(17): Xaa = Any Amino Acid
ACEFCAXNPXAXCTGXC

SEQ ID NO: 10991 - protein, 16 aa, Artificial Sequence
  Synthetically generated peptide
  VARIANT (1)..(16): Xaa = Any Amino Acid
ACEFCAXNPXACXTGC

SEQ ID NO: 10992 - protein, 17 aa, Artificial Sequence
  Synthetically generated peptide
  VARIANT (1)..(17): Xaa = Any Amino Acid
ACEFCAXNPXACXXTGC

SEQ ID NO: 10993 - protein, 17 aa, Artificial Sequence
  Synthetically generated peptide
  VARIANT (1)..(17): Xaa = Any Amino Acid
ACEFCAXNPXACXTXGC

SEQ ID NO: 10994 - protein, 17 aa, Artificial Sequence
  Synthetically generated peptide
  VARIANT (1)..(17): Xaa = Any Amino Acid
ACEFCAXNPXACXTGXC

SEQ ID NO: 10995 - protein, 16 aa, Artificial Sequence
  Synthetically generated peptide
  VARIANT (1)..(16): Xaa = Any Amino Acid
ACEFCAXNPXACTXGC

SEQ ID NO: 10996 - protein, 17 aa, Artificial Sequence
  Synthetically generated peptide
  VARIANT (1)..(17): Xaa = Any Amino Acid
ACEFCAXNPXACTXXGC

SEQ ID NO: 10997 - protein, 17 aa, Artificial Sequence
  Synthetically generated peptide
  VARIANT (1)..(17): Xaa = Any Amino Acid
ACEFCAXNPXACTXGXC

SEQ ID NO: 10998 - protein, 16 aa, Artificial Sequence
  Synthetically generated peptide
  VARIANT (1)..(16): Xaa = Any Amino Acid
ACEFCAXNPXACTGXC

SEQ ID NO: 10999 - protein, 17 aa, Artificial Sequence
  Synthetically generated peptide
  VARIANT (1)..(17): Xaa = Any Amino Acid
ACEFCAXNPXACTGXXC

SEQ ID NO: 11000 - protein, 15 aa, Artificial Sequence
  Synthetically generated peptide
  VARIANT (1)..(15): Xaa = Any Amino Acid
ACEFCAXNPAXCTGC

SEQ ID NO: 11001 - protein, 16 aa, Artificial Sequence
  Synthetically generated peptide
  VARIANT (1)..(16): Xaa = Any Amino Acid
ACEFCAXNPAXXCTGC

SEQ ID NO: 11002 - protein, 17 aa, Artificial Sequence
  Synthetically generated peptide
  VARIANT (1)..(17): Xaa = Any Amino Acid
ACEFCAXNPAXXXCTGC

SEQ ID NO: 11003 - protein, 17 aa, Artificial Sequence
  Synthetically generated peptide
  VARIANT (1)..(17): Xaa = Any Amino Acid
ACEFCAXNPAXXCXTGC

SEQ ID NO: 11004 - protein, 17 aa, Artificial Sequence
  Synthetically generated peptide
  VARIANT (1)..(17): Xaa = Any Amino Acid
ACEFCAXNPAXXCTXGC

SEQ ID NO: 11005 - protein, 17 aa, Artificial Sequence
  Synthetically generated peptide
  VARIANT (1)..(17): Xaa = Any Amino Acid
ACEFCAXNPAXXCTGXC

SEQ ID NO: 11006 - protein, 16 aa, Artificial Sequence
  Synthetically generated peptide
  VARIANT (1)..(16): Xaa = Any Amino Acid
ACEFCAXNPAXCXTGC

SEQ ID NO: 11007 - protein, 17 aa, Artificial Sequence
  Synthetically generated peptide
  VARIANT (1)..(17): Xaa = Any Amino Acid
ACEFCAXNPAXCXXTGC

SEQ ID NO: 11008 - protein, 17 aa, Artificial Sequence
  Synthetically generated peptide
  VARIANT (1)..(17): Xaa = Any Amino Acid
ACEFCAXNPAXCXTXGC

SEQ ID NO: 11009 - protein, 17 aa, Artificial Sequence
  Synthetically generated peptide
  VARIANT (1)..(17): Xaa = Any Amino Acid
ACEFCAXNPAXCXTGXC

SEQ ID NO: 11010 - protein, 16 aa, Artificial Sequence
  Synthetically generated peptide
  VARIANT (1)..(16): Xaa = Any Amino Acid
ACEFCAXNPAXCTXGC

SEQ ID NO: 11011 - protein, 17 aa, Artificial Sequence
  Synthetically generated peptide
  VARIANT (1)..(17): Xaa = Any Amino Acid
ACEFCAXNPAXCTXXGC

SEQ ID NO: 11012 - protein, 17 aa, Artificial Sequence
  Synthetically generated peptide
  VARIANT (1)..(17): Xaa = Any Amino Acid
ACEFCAXNPAXCTXGXC

SEQ ID NO: 11013 - protein, 16 aa, Artificial Sequence
  Synthetically generated peptide
  VARIANT (1)..(16): Xaa = Any Amino Acid
ACEFCAXNPAXCTGXC

SEQ ID NO: 11014 - protein, 17 aa, Artificial Sequence
  Synthetically generated peptide
  VARIANT (1)..(17): Xaa = Any Amino Acid
ACEFCAXNPAXCTGXXC

SEQ ID NO: 11015 - protein, 15 aa, Artificial Sequence
  Synthetically generated peptide
  VARIANT (1)..(15): Xaa = Any Amino Acid
ACEFCAXNPACXTGC

SEQ ID NO: 11016 - protein, 16 aa, Artificial Sequence
  Synthetically generated peptide
  VARIANT (1)..(16): Xaa = Any Amino Acid
ACEFCAXNPACXXTGC

SEQ ID NO: 11017 - protein, 17 aa, Artificial Sequence
  Synthetically generated peptide
  VARIANT (1)..(17): Xaa = Any Amino Acid
ACEFCAXNPACXXXTGC

SEQ ID NO: 11018 - protein, 17 aa, Artificial Sequence
  Synthetically generated peptide
  VARIANT (1)..(17): Xaa = Any Amino Acid
ACEFCAXNPACXXTXGC

SEQ ID NO: 11019 - protein, 17 aa, Artificial Sequence
  Synthetically generated peptide
  VARIANT (1)..(17): Xaa = Any Amino Acid
ACEFCAXNPACXXTGXC

SEQ ID NO: 11020 - protein, 16 aa, Artificial Sequence
  Synthetically generated peptide
  VARIANT (1)..(16): Xaa = Any Amino Acid
ACEFCAXNPACXTXGC

SEQ ID NO: 11021 - protein, 17 aa, Artificial Sequence
  Synthetically generated peptide
  VARIANT (1)..(17): Xaa = Any Amino Acid
ACEFCAXNPACXTXXGC

SEQ ID NO: 11022 - protein, 17 aa, Artificial Sequence
  Synthetically generated peptide
  VARIANT (1)..(17): Xaa = Any Amino Acid
ACEFCAXNPACXTXGXC

SEQ ID NO: 11023 - protein, 16 aa, Artificial Sequence
  Synthetically generated peptide
  VARIANT (1)..(16): Xaa = Any Amino Acid
ACEFCAXNPACXTGXC

SEQ ID NO: 11024 - protein, 17 aa, Artificial Sequence
  Synthetically generated peptide
  VARIANT (1)..(17): Xaa = Any Amino Acid
ACEFCAXNPACXTGXXC

SEQ ID NO: 11025 - protein, 15 aa, Artificial Sequence
  Synthetically generated peptide
  VARIANT (1)..(15): Xaa = Any Amino Acid
ACEFCAXNPACTXGC

SEQ ID NO: 11026 - protein, 16 aa, Artificial Sequence
  Synthetically generated peptide
  VARIANT (1)..(16): Xaa = Any Amino Acid
ACEFCAXNPACTXXGC

SEQ ID NO: 11027 - protein, 17 aa, Artificial Sequence
  Synthetically generated peptide
  VARIANT (1)..(17): Xaa = Any Amino Acid
ACEFCAXNPACTXXXGC

SEQ ID NO: 11028 - protein, 17 aa, Artificial Sequence
  Synthetically generated peptide
  VARIANT (1)..(17): Xaa = Any Amino Acid
ACEFCAXNPACTXXGXC

SEQ ID NO: 11029 - protein, 16 aa, Artificial Sequence
  Synthetically generated peptide
  VARIANT (1)..(16): Xaa = Any Amino Acid
ACEFCAXNPACTXGXC

SEQ ID NO: 11030 - protein, 17 aa, Artificial Sequence
  Synthetically generated peptide
  VARIANT (1)..(17): Xaa = Any Amino Acid
ACEFCAXNPACTXGXXC

SEQ ID NO: 11031 - protein, 15 aa, Artificial Sequence
  Synthetically generated peptide
  VARIANT (1)..(15): Xaa = Any Amino Acid
ACEFCAXNPACTGXC

SEQ ID NO: 11032 - protein, 16 aa, Artificial Sequence
  Synthetically generated peptide
  VARIANT (1)..(16): Xaa = Any Amino Acid
ACEFCAXNPACTGXXC

SEQ ID NO: 11033 - protein, 17 aa, Artificial Sequence
  Synthetically generated peptide
  VARIANT (1)..(17): Xaa = Any Amino Acid
ACEFCAXNPACTGXXXC

SEQ ID NO: 11034 - protein, 14 aa, Artificial Sequence
  Synthetically generated peptide
  VARIANT (1)..(14): Xaa = Any Amino Acid
ACEFCANXPACTGC

SEQ ID NO: 11035 - protein, 15 aa, Artificial Sequence
  Synthetically generated peptide
  VARIANT (1)..(15): Xaa = Any Amino Acid
ACEFCANXXPACTGC

SEQ ID NO: 11036 - protein, 16 aa, Artificial Sequence
  Synthetically generated peptide
  VARIANT (1)..(16): Xaa = Any Amino Acid
ACEFCANXXXPACTGC

SEQ ID NO: 11037 - protein, 17 aa, Artificial Sequence
  Synthetically generated peptide
  VARIANT (1)..(17): Xaa = Any Amino Acid
ACEFCANXXXXPACTGC

SEQ ID NO: 11038 - protein, 17 aa, Artificial Sequence
  Synthetically generated peptide
  VARIANT (1)..(17): Xaa = Any Amino Acid
ACEFCANXXXPXACTGC

SEQ ID NO: 11039 - protein, 17 aa, Artificial Sequence
  Synthetically generated peptide
  VARIANT (1)..(17): Xaa = Any Amino Acid
ACEFCANXXXPAXCTGC

SEQ ID NO: 11040 - protein, 17 aa, Artificial Sequence
  Synthetically generated peptide
  VARIANT (1)..(17): Xaa = Any Amino Acid
ACEFCANXXXPACXTGC

SEQ ID NO: 11041 - protein, 17 aa, Artificial Sequence
  Synthetically generated peptide
  VARIANT (1)..(17): Xaa = Any Amino Acid
ACEFCANXXXPACTXGC

SEQ ID NO: 11042 - protein, 17 aa, Artificial Sequence
  Synthetically generated peptide
  VARIANT (1)..(17): Xaa = Any Amino Acid
ACEFCANXXXPACTGXC

SEQ ID NO: 11043 - protein, 16 aa, Artificial Sequence
  Synthetically generated peptide
  VARIANT (1)..(16): Xaa = Any Amino Acid
ACEFCANXXPXACTGC

SEQ ID NO: 11044 - protein, 17 aa, Artificial Sequence
  Synthetically generated peptide
  VARIANT (1)..(17): Xaa = Any Amino Acid
ACEFCANXXPXXACTGC

SEQ ID NO: 11045 - protein, 17 aa, Artificial Sequence
  Synthetically generated peptide
  VARIANT (1)..(17): Xaa = Any Amino Acid
ACEFCANXXPXAXCTGC

SEQ ID NO: 11046 - protein, 17 aa, Artificial Sequence
  Synthetically generated peptide
  VARIANT (1)..(17): Xaa = Any Amino Acid
ACEFCANXXPXACXTGC

SEQ ID NO: 11047 - protein, 17 aa, Artificial Sequence
  Synthetically generated peptide
  VARIANT (1)..(17): Xaa = Any Amino Acid
ACEFCANXXPXACTXGC

SEQ ID NO: 11048 - protein, 17 aa, Artificial Sequence
  Synthetically generated peptide
  VARIANT (1)..(17): Xaa = Any Amino Acid
ACEFCANXXPXACTGXC

SEQ ID NO: 11049 - protein, 16 aa, Artificial Sequence
  Synthetically generated peptide
  VARIANT (1)..(16): Xaa = Any Amino Acid
ACEFCANXXPAXCTGC

SEQ ID NO: 11050 - protein, 17 aa, Artificial Sequence
  Synthetically generated peptide
  VARIANT (1)..(17): Xaa = Any Amino Acid
ACEFCANXXPAXXCTGC

SEQ ID NO: 11051 - protein, 17 aa, Artificial Sequence
  Synthetically generated peptide
  VARIANT (1)..(17): Xaa = Any Amino Acid
ACEFCANXXPAXCXTGC

SEQ ID NO: 11052 - protein, 17 aa, Artificial Sequence
  Synthetically generated peptide
  VARIANT (1)..(17): Xaa = Any Amino Acid
ACEFCANXXPAXCTXGC

SEQ ID NO: 11053 - protein, 17 aa, Artificial Sequence
  Synthetically generated peptide
  VARIANT (1)..(17): Xaa = Any Amino Acid
ACEFCANXXPAXCTGXC

SEQ ID NO: 11054 - protein, 16 aa, Artificial Sequence
  Synthetically generated peptide
  VARIANT (1)..(16): Xaa = Any Amino Acid
ACEFCANXXPACXTGC

SEQ ID NO: 11055 - protein, 17 aa, Artificial Sequence
  Synthetically generated peptide
  VARIANT (1)..(17): Xaa = Any Amino Acid
ACEFCANXXPACXXTGC

SEQ ID NO: 11056 - protein, 17 aa, Artificial Sequence
  Synthetically generated peptide
  VARIANT (1)..(17): Xaa = Any Amino Acid
ACEFCANXXPACXTXGC

SEQ ID NO: 11057 - protein, 17 aa, Artificial Sequence
  Synthetically generated peptide
  VARIANT (1)..(17): Xaa = Any Amino Acid
ACEFCANXXPACXTGXC

SEQ ID NO: 11058 - protein, 16 aa, Artificial Sequence
  Synthetically generated peptide
  VARIANT (1)..(16): Xaa = Any Amino Acid
ACEFCANXXPACTXGC

SEQ ID NO: 11059 - protein, 17 aa, Artificial Sequence
  Synthetically generated peptide
  VARIANT (1)..(17): Xaa = Any Amino Acid
ACEFCANXXPACTXXGC

SEQ ID NO: 11060 - protein, 17 aa, Artificial Sequence
  Synthetically generated peptide
  VARIANT (1)..(17): Xaa = Any Amino Acid
ACEFCANXXPACTXGXC

SEQ ID NO: 11061 - protein, 16 aa, Artificial Sequence
  Synthetically generated peptide
  VARIANT (1)..(16): Xaa = Any Amino Acid
ACEFCANXXPACTGXC

SEQ ID NO: 11062 - protein, 17 aa, Artificial Sequence
  Synthetically generated peptide
  VARIANT (1)..(17): Xaa = Any Amino Acid
ACEFCANXXPACTGXXC

SEQ ID NO: 11063 - protein, 15 aa, Artificial Sequence
  Synthetically generated peptide
  VARIANT (1)..(15): Xaa = Any Amino Acid
ACEFCANXPXACTGC

SEQ ID NO: 11064 - protein, 16 aa, Artificial Sequence
  Synthetically generated peptide
  VARIANT (1)..(16): Xaa = Any Amino Acid
ACEFCANXPXXACTGC

SEQ ID NO: 11065 - protein, 17 aa, Artificial Sequence
  Synthetically generated peptide
  VARIANT (1)..(17): Xaa = Any Amino Acid
ACEFCANXPXXXACTGC

SEQ ID NO: 11066 - protein, 17 aa, Artificial Sequence
  Synthetically generated peptide
  VARIANT (1)..(17): Xaa = Any Amino Acid
ACEFCANXPXXAXCTGC

SEQ ID NO: 11067 - protein, 17 aa, Artificial Sequence
  Synthetically generated peptide
  VARIANT (1)..(17): Xaa = Any Amino Acid
ACEFCANXPXXACXTGC

SEQ ID NO: 11068 - protein, 17 aa, Artificial Sequence
  Synthetically generated peptide
  VARIANT (1)..(17): Xaa = Any Amino Acid
ACEFCANXPXXACTXGC

SEQ ID NO: 11069 - protein, 17 aa, Artificial Sequence
  Synthetically generated peptide
  VARIANT (1)..(17): Xaa = Any Amino Acid
ACEFCANXPXXACTGXC

SEQ ID NO: 11070 - protein, 16 aa, Artificial Sequence
  Synthetically generated peptide
  VARIANT (1)..(16): Xaa = Any Amino Acid
ACEFCANXPXAXCTGC

SEQ ID NO: 11071 - protein, 17 aa, Artificial Sequence
  Synthetically generated peptide
  VARIANT (1)..(17): Xaa = Any Amino Acid
ACEFCANXPXAXXCTGC

SEQ ID NO: 11072 - protein, 17 aa, Artificial Sequence
  Synthetically generated peptide
  VARIANT (1)..(17): Xaa = Any Amino Acid
ACEFCANXPXAXCXTGC

SEQ ID NO: 11073 - protein, 17 aa, Artificial Sequence
  Synthetically generated peptide
  VARIANT (1)..(17): Xaa = Any Amino Acid
ACEFCANXPXAXCTXGC

SEQ ID NO: 11074 - protein, 17 aa, Artificial Sequence
  Synthetically generated peptide
  VARIANT (1)..(17): Xaa = Any Amino Acid
ACEFCANXPXAXCTGXC

SEQ ID NO: 11075 - protein, 16 aa, Artificial Sequence
  Synthetically generated peptide
  VARIANT (1)..(16): Xaa = Any Amino Acid
ACEFCANXPXACXTGC

SEQ ID NO: 11076 - protein, 17 aa, Artificial Sequence
  Synthetically generated peptide
  VARIANT (1)..(17): Xaa = Any Amino Acid
ACEFCANXPXACXXTGC

SEQ ID NO: 11077 - protein, 17 aa, Artificial Sequence
  Synthetically generated peptide
  VARIANT (1)..(17): Xaa = Any Amino Acid
ACEFCANXPXACXTXGC

SEQ ID NO: 11078 - protein, 17 aa, Artificial Sequence
  Synthetically generated peptide
  VARIANT (1)..(17): Xaa = Any Amino Acid
ACEFCANXPXACXTGXC

SEQ ID NO: 11079 - protein, 16 aa, Artificial Sequence
  Synthetically generated peptide
  VARIANT (1)..(16): Xaa = Any Amino Acid
ACEFCANXPXACTXGC

SEQ ID NO: 11080 - protein, 17 aa, Artificial Sequence
  Synthetically generated peptide
  VARIANT (1)..(17): Xaa = Any Amino Acid
ACEFCANXPXACTXXGC

SEQ ID NO: 11081 - protein, 17 aa, Artificial Sequence
  Synthetically generated peptide
  VARIANT (1)..(17): Xaa = Any Amino Acid
ACEFCANXPXACTXGXC

SEQ ID NO: 11082 - protein, 16 aa, Artificial Sequence
  Synthetically generated peptide
  VARIANT (1)..(16): Xaa = Any Amino Acid
ACEFCANXPXACTGXC

SEQ ID NO: 11083 - protein, 17 aa, Artificial Sequence
  Synthetically generated peptide
  VARIANT (1)..(17): Xaa = Any Amino Acid
ACEFCANXPXACTGXXC

SEQ ID NO: 11084 - protein, 15 aa, Artificial Sequence
  Synthetically generated peptide
  VARIANT (1)..(15): Xaa = Any Amino Acid
ACEFCANXPAXCTGC

SEQ ID NO: 11085 - protein, 16 aa, Artificial Sequence
  Synthetically generated peptide
  VARIANT (1)..(16): Xaa = Any Amino Acid
ACEFCANXPAXXCTGC

SEQ ID NO: 11086 - protein, 17 aa, Artificial Sequence
  Synthetically generated peptide
  VARIANT (1)..(17): Xaa = Any Amino Acid
ACEFCANXPAXXXCTGC

SEQ ID NO: 11087 - protein, 17 aa, Artificial Sequence
  Synthetically generated peptide
  VARIANT (1)..(17): Xaa = Any Amino Acid
ACEFCANXPAXXCXTGC

SEQ ID NO: 11088 - protein, 17 aa, Artificial Sequence
  Synthetically generated peptide
  VARIANT (1)..(17): Xaa = Any Amino Acid
ACEFCANXPAXXCTXGC

SEQ ID NO: 11089 - protein, 17 aa, Artificial Sequence
  Synthetically generated peptide
  VARIANT (1)..(17): Xaa = Any Amino Acid
ACEFCANXPAXXCTGXC

SEQ ID NO: 11090 - protein, 16 aa, Artificial Sequence
  Synthetically generated peptide
  VARIANT (1)..(16): Xaa = Any Amino Acid
ACEFCANXPAXCXTGC

SEQ ID NO: 11091 - protein, 17 aa, Artificial Sequence
  Synthetically generated peptide
  VARIANT (1)..(17): Xaa = Any Amino Acid
ACEFCANXPAXCXXTGC

SEQ ID NO: 11092 - protein, 17 aa, Artificial Sequence
  Synthetically generated peptide
  VARIANT (1)..(17): Xaa = Any Amino Acid
ACEFCANXPAXCXTXGC

SEQ ID NO: 11093 - protein, 17 aa, Artificial Sequence
  Synthetically generated peptide
  VARIANT (1)..(17): Xaa = Any Amino Acid
ACEFCANXPAXCXTGXC

SEQ ID NO: 11094 - protein, 16 aa, Artificial Sequence
  Synthetically generated peptide
  VARIANT (1)..(16): Xaa = Any Amino Acid
ACEFCANXPAXCTXGC

SEQ ID NO: 11095 - protein, 17 aa, Artificial Sequence
  Synthetically generated peptide
  VARIANT (1)..(17): Xaa = Any Amino Acid
ACEFCANXPAXCTXXGC

SEQ ID NO: 11096 - protein, 17 aa, Artificial Sequence
  Synthetically generated peptide
  VARIANT (1)..(17): Xaa = Any Amino Acid
ACEFCANXPAXCTXGXC

SEQ ID NO: 11097 - protein, 16 aa, Artificial Sequence
  Synthetically generated peptide
  VARIANT (1)..(16): Xaa = Any Amino Acid
ACEFCANXPAXCTGXC

SEQ ID NO: 11098 - protein, 17 aa, Artificial Sequence
  Synthetically generated peptide
  VARIANT (1)..(17): Xaa = Any Amino Acid
ACEFCANXPAXCTGXXC

SEQ ID NO: 11099 - protein, 15 aa, Artificial Sequence
  Synthetically generated peptide
  VARIANT (1)..(15): Xaa = Any Amino Acid
ACEFCANXPACXTGC

SEQ ID NO: 11100 - protein, 16 aa, Artificial Sequence
  Synthetically generated peptide
  VARIANT (1)..(16): Xaa = Any Amino Acid
ACEFCANXPACXXTGC

SEQ ID NO: 11101 - protein, 17 aa, Artificial Sequence
  Synthetically generated peptide
  VARIANT (1)..(17): Xaa = Any Amino Acid
ACEFCANXPACXXXTGC

SEQ ID NO: 11102 - protein, 17 aa, Artificial Sequence
  Synthetically generated peptide
  VARIANT (1)..(17): Xaa = Any Amino Acid
ACEFCANXPACXXTXGC

SEQ ID NO: 11103 - protein, 17 aa, Artificial Sequence
  Synthetically generated peptide
  VARIANT (1)..(17): Xaa = Any Amino Acid
ACEFCANXPACXXTGXC

SEQ ID NO: 11104 - protein, 16 aa, Artificial Sequence
  Synthetically generated peptide
  VARIANT (1)..(16): Xaa = Any Amino Acid
ACEFCANXPACXTXGC

SEQ ID NO: 11105 - protein, 17 aa, Artificial Sequence
  Synthetically generated peptide
  VARIANT (1)..(17): Xaa = Any Amino Acid
ACEFCANXPACXTXXGC

SEQ ID NO: 11106 - protein, 17 aa, Artificial Sequence
  Synthetically generated peptide
  VARIANT (1)..(17): Xaa = Any Amino Acid
ACEFCANXPACXTXGXC

SEQ ID NO: 11107 - protein, 16 aa, Artificial Sequence
  Synthetically generated peptide
  VARIANT (1)..(16): Xaa = Any Amino Acid
ACEFCANXPACXTGXC

SEQ ID NO: 11108 - protein, 17 aa, Artificial Sequence
  Synthetically generated peptide
  VARIANT (1)..(17): Xaa = Any Amino Acid
ACEFCANXPACXTGXXC

SEQ ID NO: 11109 - protein, 15 aa, Artificial Sequence
  Synthetically generated peptide
  VARIANT (1)..(15): Xaa = Any Amino Acid
ACEFCANXPACTXGC

SEQ ID NO: 11110 - protein, 16 aa, Artificial Sequence
  Synthetically generated peptide
  VARIANT (1)..(16): Xaa = Any Amino Acid
ACEFCANXPACTXXGC

SEQ ID NO: 11111 - protein, 17 aa, Artificial Sequence
  Synthetically generated peptide
  VARIANT (1)..(17): Xaa = Any Amino Acid
ACEFCANXPACTXXXGC

SEQ ID NO: 11112 - protein, 17 aa, Artificial Sequence
  Synthetically generated peptide
  VARIANT (1)..(17): Xaa = Any Amino Acid
ACEFCANXPACTXXGXC

SEQ ID NO: 11113 - protein, 16 aa, Artificial Sequence
  Synthetically generated peptide
  VARIANT (1)..(16): Xaa = Any Amino Acid
ACEFCANXPACTXGXC

SEQ ID NO: 11114 - protein, 17 aa, Artificial Sequence
  Synthetically generated peptide
  VARIANT (1)..(17): Xaa = Any Amino Acid
ACEFCANXPACTXGXXC

SEQ ID NO: 11115 - protein, 15 aa, Artificial Sequence
  Synthetically generated peptide
  VARIANT (1)..(15): Xaa = Any Amino Acid
ACEFCANXPACTGXC

SEQ ID NO: 11116 - protein, 16 aa, Artificial Sequence
  Synthetically generated peptide
  VARIANT (1)..(16): Xaa = Any Amino Acid
ACEFCANXPACTGXXC

SEQ ID NO: 11117 - protein, 17 aa, Artificial Sequence
  Synthetically generated peptide
  VARIANT (1)..(17): Xaa = Any Amino Acid
ACEFCANXPACTGXXXC

SEQ ID NO: 11118 - protein, 14 aa, Artificial Sequence
  Synthetically generated peptide
  VARIANT (1)..(14): Xaa = Any Amino Acid
ACEFCANPXACTGC

SEQ ID NO: 11119 - protein, 15 aa, Artificial Sequence
  Synthetically generated peptide
  VARIANT (1)..(15): Xaa = Any Amino Acid
ACEFCANPXXACTGC

SEQ ID NO: 11120 - protein, 16 aa, Artificial Sequence
  Synthetically generated peptide
  VARIANT (1)..(16): Xaa = Any Amino Acid
ACEFCANPXXXACTGC

SEQ ID NO: 11121 - protein, 17 aa, Artificial Sequence
  Synthetically generated peptide
  VARIANT (1)..(17): Xaa = Any Amino Acid
ACEFCANPXXXXACTGC

SEQ ID NO: 11122 - protein, 17 aa, Artificial Sequence
  Synthetically generated peptide
  VARIANT (1)..(17): Xaa = Any Amino Acid
ACEFCANPXXXAXCTGC

SEQ ID NO: 11123 - protein, 17 aa, Artificial Sequence
  Synthetically generated peptide
  VARIANT (1)..(17): Xaa = Any Amino Acid
ACEFCANPXXXACXTGC

SEQ ID NO: 11124 - protein, 17 aa, Artificial Sequence
  Synthetically generated peptide
  VARIANT (1)..(17): Xaa = Any Amino Acid
ACEFCANPXXXACTXGC

SEQ ID NO: 11125 - protein, 17 aa, Artificial Sequence
  Synthetically generated peptide
  VARIANT (1)..(17): Xaa = Any Amino Acid
ACEFCANPXXXACTGXC

SEQ ID NO: 11126 - protein, 16 aa, Artificial Sequence
  Synthetically generated peptide
  VARIANT (1)..(16): Xaa = Any Amino Acid
ACEFCANPXXAXCTGC

SEQ ID NO: 11127 - protein, 17 aa, Artificial Sequence
  Synthetically generated peptide
  VARIANT (1)..(17): Xaa = Any Amino Acid
ACEFCANPXXAXXCTGC

SEQ ID NO: 11128 - protein, 17 aa, Artificial Sequence
  Synthetically generated peptide
  VARIANT (1)..(17): Xaa = Any Amino Acid
ACEFCANPXXAXCXTGC

SEQ ID NO: 11129 - protein, 17 aa, Artificial Sequence
  Synthetically generated peptide
  VARIANT (1)..(17): Xaa = Any Amino Acid
ACEFCANPXXAXCTXGC

SEQ ID NO: 11130 - protein, 17 aa, Artificial Sequence
  Synthetically generated peptide
  VARIANT (1)..(17): Xaa = Any Amino Acid
ACEFCANPXXAXCTGXC

SEQ ID NO: 11131 - protein, 16 aa, Artificial Sequence
  Synthetically generated peptide
  VARIANT (1)..(16): Xaa = Any Amino Acid
ACEFCANPXXACXTGC

SEQ ID NO: 11132 - protein, 17 aa, Artificial Sequence
  Synthetically generated peptide
  VARIANT (1)..(17): Xaa = Any Amino Acid
ACEFCANPXXACXXTGC

SEQ ID NO: 11133 - protein, 17 aa, Artificial Sequence
  Synthetically generated peptide
  VARIANT (1)..(17): Xaa = Any Amino Acid
ACEFCANPXXACXTXGC

SEQ ID NO: 11134 - protein, 17 aa, Artificial Sequence
  Synthetically generated peptide
  VARIANT (1)..(17): Xaa = Any Amino Acid
ACEFCANPXXACXTGXC

SEQ ID NO: 11135 - protein, 16 aa, Artificial Sequence
  Synthetically generated peptide
  VARIANT (1)..(16): Xaa = Any Amino Acid
ACEFCANPXXACTXGC

SEQ ID NO: 11136 - protein, 17 aa, Artificial Sequence
  Synthetically generated peptide
  VARIANT (1)..(17): Xaa = Any Amino Acid
ACEFCANPXXACTXXGC

SEQ ID NO: 11137 - protein, 17 aa, Artificial Sequence
  Synthetically generated peptide
  VARIANT (1)..(17): Xaa = Any Amino Acid
ACEFCANPXXACTXGXC

SEQ ID NO: 11138 - protein, 16 aa, Artificial Sequence
  Synthetically generated peptide
  VARIANT (1)..(16): Xaa = Any Amino Acid
ACEFCANPXXACTGXC

SEQ ID NO: 11139 - protein, 17 aa, Artificial Sequence
  Synthetically generated peptide
  VARIANT (1)..(17): Xaa = Any Amino Acid
ACEFCANPXXACTGXXC

SEQ ID NO: 11140 - protein, 15 aa, Artificial Sequence
  Synthetically generated peptide
  VARIANT (1)..(15): Xaa = Any Amino Acid
ACEFCANPXAXCTGC

SEQ ID NO: 11141 - protein, 16 aa, Artificial Sequence
  Synthetically generated peptide
  VARIANT (1)..(16): Xaa = Any Amino Acid
ACEFCANPXAXXCTGC

SEQ ID NO: 11142 - protein, 17 aa, Artificial Sequence
  Synthetically generated peptide
  VARIANT (1)..(17): Xaa = Any Amino Acid
ACEFCANPXAXXXCTGC

SEQ ID NO: 11143 - protein, 17 aa, Artificial Sequence
  Synthetically generated peptide
  VARIANT (1)..(17): Xaa = Any Amino Acid
ACEFCANPXAXXCXTGC

SEQ ID NO: 11144 - protein, 17 aa, Artificial Sequence
  Synthetically generated peptide
  VARIANT (1)..(17): Xaa = Any Amino Acid
ACEFCANPXAXXCTXGC

SEQ ID NO: 11145 - protein, 17 aa, Artificial Sequence
  Synthetically generated peptide
  VARIANT (1)..(17): Xaa = Any Amino Acid
ACEFCANPXAXXCTGXC

SEQ ID NO: 11146 - protein, 16 aa, Artificial Sequence
  Synthetically generated peptide
  VARIANT (1)..(16): Xaa = Any Amino Acid
ACEFCANPXAXCXTGC

SEQ ID NO: 11147 - protein, 17 aa, Artificial Sequence
  Synthetically generated peptide
  VARIANT (1)..(17): Xaa = Any Amino Acid
ACEFCANPXAXCXXTGC

SEQ ID NO: 11148 - protein, 17 aa, Artificial Sequence
  Synthetically generated peptide
  VARIANT (1)..(17): Xaa = Any Amino Acid
ACEFCANPXAXCXTXGC

SEQ ID NO: 11149 - protein, 17 aa, Artificial Sequence
  Synthetically generated peptide
  VARIANT (1)..(17): Xaa = Any Amino Acid
ACEFCANPXAXCXTGXC

SEQ ID NO: 11150 - protein, 16 aa, Artificial Sequence
  Synthetically generated peptide
  VARIANT (1)..(16): Xaa = Any Amino Acid
ACEFCANPXAXCTXGC

SEQ ID NO: 11151 - protein, 17 aa, Artificial Sequence
  Synthetically generated peptide
  VARIANT (1)..(17): Xaa = Any Amino Acid
ACEFCANPXAXCTXXGC

SEQ ID NO: 11152 - protein, 17 aa, Artificial Sequence
  Synthetically generated peptide
  VARIANT (1)..(17): Xaa = Any Amino Acid
ACEFCANPXAXCTXGXC

SEQ ID NO: 11153 - protein, 16 aa, Artificial Sequence
  Synthetically generated peptide
  VARIANT (1)..(16): Xaa = Any Amino Acid
ACEFCANPXAXCTGXC

SEQ ID NO: 11154 - protein, 17 aa, Artificial Sequence
  Synthetically generated peptide
  VARIANT (1)..(17): Xaa = Any Amino Acid
ACEFCANPXAXCTGXXC

SEQ ID NO: 11155 - protein, 15 aa, Artificial Sequence
  Synthetically generated peptide
  VARIANT (1)..(15): Xaa = Any Amino Acid
ACEFCANPXACXTGC

SEQ ID NO: 11156 - protein, 16 aa, Artificial Sequence
  Synthetically generated peptide
  VARIANT (1)..(16): Xaa = Any Amino Acid
ACEFCANPXACXXTGC

SEQ ID NO: 11157 - protein, 17 aa, Artificial Sequence
  Synthetically generated peptide
  VARIANT (1)..(17): Xaa = Any Amino Acid
ACEFCANPXACXXXTGC

SEQ ID NO: 11158 - protein, 17 aa, Artificial Sequence
  Synthetically generated peptide
  VARIANT (1)..(17): Xaa = Any Amino Acid
ACEFCANPXACXXTXGC

SEQ ID NO: 11159 - protein, 17 aa, Artificial Sequence
  Synthetically generated peptide
  VARIANT (1)..(17): Xaa = Any Amino Acid
ACEFCANPXACXXTGXC

SEQ ID NO: 11160 - protein, 16 aa, Artificial Sequence
  Synthetically generated peptide
  VARIANT (1)..(16): Xaa = Any Amino Acid
ACEFCANPXACXTXGC

SEQ ID NO: 11161 - protein, 17 aa, Artificial Sequence
  Synthetically generated peptide
  VARIANT (1)..(17): Xaa = Any Amino Acid
ACEFCANPXACXTXXGC

SEQ ID NO: 11162 - protein, 17 aa, Artificial Sequence
  Synthetically generated peptide
  VARIANT (1)..(17): Xaa = Any Amino Acid
ACEFCANPXACXTXGXC

SEQ ID NO: 11163 - protein, 16 aa, Artificial Sequence
  Synthetically generated peptide
  VARIANT (1)..(16): Xaa = Any Amino Acid
ACEFCANPXACXTGXC

SEQ ID NO: 11164 - protein, 17 aa, Artificial Sequence
  Synthetically generated peptide
  VARIANT (1)..(17): Xaa = Any Amino Acid
ACEFCANPXACXTGXXC

SEQ ID NO: 11165 - protein, 15 aa, Artificial Sequence
  Synthetically generated peptide
  VARIANT (1)..(15): Xaa = Any Amino Acid
ACEFCANPXACTXGC

SEQ ID NO: 11166 - protein, 16 aa, Artificial Sequence
  Synthetically generated peptide
  VARIANT (1)..(16): Xaa = Any Amino Acid
ACEFCANPXACTXXGC

SEQ ID NO: 11167 - protein, 17 aa, Artificial Sequence
  Synthetically generated peptide
  VARIANT (1)..(17): Xaa = Any Amino Acid
ACEFCANPXACTXXXGC

SEQ ID NO: 11168 - protein, 17 aa, Artificial Sequence
  Synthetically generated peptide
  VARIANT (1)..(17): Xaa = Any Amino Acid
ACEFCANPXACTXXGXC

SEQ ID NO: 11169 - protein, 16 aa, Artificial Sequence
  Synthetically generated peptide
  VARIANT (1)..(16): Xaa = Any Amino Acid
ACEFCANPXACTXGXC

SEQ ID NO: 11170 - protein, 17 aa, Artificial Sequence
  Synthetically generated peptide
  VARIANT (1)..(17): Xaa = Any Amino Acid
ACEFCANPXACTXGXXC

SEQ ID NO: 11171 - protein, 15 aa, Artificial Sequence
  Synthetically generated peptide
  VARIANT (1)..(15): Xaa = Any Amino Acid
ACEFCANPXACTGXC

SEQ ID NO: 11172 - protein, 16 aa, Artificial Sequence
  Synthetically generated peptide
  VARIANT (1)..(16): Xaa = Any Amino Acid
ACEFCANPXACTGXXC

SEQ ID NO: 11173 - protein, 17 aa, Artificial Sequence
  Synthetically generated peptide
  VARIANT (1)..(17): Xaa = Any Amino Acid
ACEFCANPXACTGXXXC

SEQ ID NO: 11174 - protein, 14 aa, Artificial Sequence
  Synthetically generated peptide
  VARIANT (1)..(14): Xaa = Any Amino Acid
ACEFCANPAXCTGC

SEQ ID NO: 11175 - protein, 15 aa, Artificial Sequence
  Synthetically generated peptide
  VARIANT (1)..(15): Xaa = Any Amino Acid
ACEFCANPAXXCTGC

SEQ ID NO: 11176 - protein, 16 aa, Artificial Sequence
  Synthetically generated peptide
  VARIANT (1)..(16): Xaa = Any Amino Acid
ACEFCANPAXXXCTGC

SEQ ID NO: 11177 - protein, 17 aa, Artificial Sequence
  Synthetically generated peptide
  VARIANT (1)..(17): Xaa = Any Amino Acid
ACEFCANPAXXXXCTGC

SEQ ID NO: 11178 - protein, 17 aa, Artificial Sequence
  Synthetically generated peptide
  VARIANT (1)..(17): Xaa = Any Amino Acid
ACEFCANPAXXXCXTGC

SEQ ID NO: 11179 - protein, 17 aa, Artificial Sequence
  Synthetically generated peptide
  VARIANT (1)..(17): Xaa = Any Amino Acid
ACEFCANPAXXXCTXGC

SEQ ID NO: 11180 - protein, 17 aa, Artificial Sequence
  Synthetically generated peptide
  VARIANT (1)..(17): Xaa = Any Amino Acid
ACEFCANPAXXXCTGXC

SEQ ID NO: 11181 - protein, 16 aa, Artificial Sequence
  Synthetically generated peptide
  VARIANT (1)..(16): Xaa = Any Amino Acid
ACEFCANPAXXCXTGC

SEQ ID NO: 11182 - protein, 17 aa, Artificial Sequence
  Synthetically generated peptide
  VARIANT (1)..(17): Xaa = Any Amino Acid
ACEFCANPAXXCXXTGC

SEQ ID NO: 11183 - protein, 17 aa, Artificial Sequence
  Synthetically generated peptide
  VARIANT (1)..(17): Xaa = Any Amino Acid
ACEFCANPAXXCXTXGC

SEQ ID NO: 11184 - protein, 17 aa, Artificial Sequence
  Synthetically generated peptide
  VARIANT (1)..(17): Xaa = Any Amino Acid
ACEFCANPAXXCXTGXC

SEQ ID NO: 11185 - protein, 16 aa, Artificial Sequence
  Synthetically generated peptide
  VARIANT (1)..(16): Xaa = Any Amino Acid
ACEFCANPAXXCTXGC

SEQ ID NO: 11186 - protein, 17 aa, Artificial Sequence
  Synthetically generated peptide
  VARIANT (1)..(17): Xaa = Any Amino Acid
ACEFCANPAXXCTXXGC

SEQ ID NO: 11187 - protein, 17 aa, Artificial Sequence
  Synthetically generated peptide
  VARIANT (1)..(17): Xaa = Any Amino Acid
ACEFCANPAXXCTXGXC

SEQ ID NO: 11188 - protein, 16 aa, Artificial Sequence
  Synthetically generated peptide
  VARIANT (1)..(16): Xaa = Any Amino Acid
ACEFCANPAXXCTGXC

SEQ ID NO: 11189 - protein, 17 aa, Artificial Sequence
  Synthetically generated peptide
  VARIANT (1)..(17): Xaa = Any Amino Acid
ACEFCANPAXXCTGXXC

SEQ ID NO: 11190 - protein, 15 aa, Artificial Sequence
  Synthetically generated peptide
  VARIANT (1)..(15): Xaa = Any Amino Acid
ACEFCANPAXCXTGC

SEQ ID NO: 11191 - protein, 16 aa, Artificial Sequence
  Synthetically generated peptide
  VARIANT (1)..(16): Xaa = Any Amino Acid
ACEFCANPAXCXXTGC

SEQ ID NO: 11192 - protein, 17 aa, Artificial Sequence
  Synthetically generated peptide
  VARIANT (1)..(17): Xaa = Any Amino Acid
ACEFCANPAXCXXXTGC

SEQ ID NO: 11193 - protein, 17 aa, Artificial Sequence
  Synthetically generated peptide
  VARIANT (1)..(17): Xaa = Any Amino Acid
ACEFCANPAXCXXTXGC

SEQ ID NO: 11194 - protein, 17 aa, Artificial Sequence
  Synthetically generated peptide
  VARIANT (1)..(17): Xaa = Any Amino Acid
ACEFCANPAXCXXTGXC

SEQ ID NO: 11195 - protein, 16 aa, Artificial Sequence
  Synthetically generated peptide
  VARIANT (1)..(16): Xaa = Any Amino Acid
ACEFCANPAXCXTXGC

SEQ ID NO: 11196 - protein, 17 aa, Artificial Sequence
  Synthetically generated peptide
  VARIANT (1)..(17): Xaa = Any Amino Acid
ACEFCANPAXCXTXXGC

SEQ ID NO: 11197 - protein, 17 aa, Artificial Sequence
  Synthetically generated peptide
  VARIANT (1)..(17): Xaa = Any Amino Acid
ACEFCANPAXCXTXGXC

SEQ ID NO: 11198 - protein, 16 aa, Artificial Sequence
  Synthetically generated peptide
  VARIANT (1)..(16): Xaa = Any Amino Acid
ACEFCANPAXCXTGXC

SEQ ID NO: 11199 - protein, 17 aa, Artificial Sequence
  Synthetically generated peptide
  VARIANT (1)..(17): Xaa = Any Amino Acid
ACEFCANPAXCXTGXXC

SEQ ID NO: 11200 - protein, 15 aa, Artificial Sequence
  Synthetically generated peptide
  VARIANT (1)..(15): Xaa = Any Amino Acid
ACEFCANPAXCTXGC

SEQ ID NO: 11201 - protein, 16 aa, Artificial Sequence
  Synthetically generated peptide
  VARIANT (1)..(16): Xaa = Any Amino Acid
ACEFCANPAXCTXXGC

SEQ ID NO: 11202 - protein, 17 aa, Artificial Sequence
  Synthetically generated peptide
  VARIANT (1)..(17): Xaa = Any Amino Acid
ACEFCANPAXCTXXXGC

SEQ ID NO: 11203 - protein, 17 aa, Artificial Sequence
  Synthetically generated peptide
  VARIANT (1)..(17): Xaa = Any Amino Acid
ACEFCANPAXCTXXGXC

SEQ ID NO: 11204 - protein, 16 aa, Artificial Sequence
  Synthetically generated peptide
  VARIANT (1)..(16): Xaa = Any Amino Acid
ACEFCANPAXCTXGXC

SEQ ID NO: 11205 - protein, 17 aa, Artificial Sequence
  Synthetically generated peptide
  VARIANT (1)..(17): Xaa = Any Amino Acid
ACEFCANPAXCTXGXXC

SEQ ID NO: 11206 - protein, 15 aa, Artificial Sequence
  Synthetically generated peptide
  VARIANT (1)..(15): Xaa = Any Amino Acid
ACEFCANPAXCTGXC

SEQ ID NO: 11207 - protein, 16 aa, Artificial Sequence
  Synthetically generated peptide
  VARIANT (1)..(16): Xaa = Any Amino Acid
ACEFCANPAXCTGXXC

SEQ ID NO: 11208 - protein, 17 aa, Artificial Sequence
  Synthetically generated peptide
  VARIANT (1)..(17): Xaa = Any Amino Acid
ACEFCANPAXCTGXXXC

SEQ ID NO: 11209 - protein, 14 aa, Artificial Sequence
  Synthetically generated peptide
  VARIANT (1)..(14): Xaa = Any Amino Acid
ACEFCANPACXTGC

SEQ ID NO: 11210 - protein, 15 aa, Artificial Sequence
  Synthetically generated peptide
  VARIANT (1)..(15): Xaa = Any Amino Acid
ACEFCANPACXXTGC

SEQ ID NO: 11211 - protein, 16 aa, Artificial Sequence
  Synthetically generated peptide
  VARIANT (1)..(16): Xaa = Any Amino Acid
ACEFCANPACXXXTGC

SEQ ID NO: 11212 - protein, 17 aa, Artificial Sequence
  Synthetically generated peptide
  VARIANT (1)..(17): Xaa = Any Amino Acid
ACEFCANPACXXXXTGC

SEQ ID NO: 11213 - protein, 17 aa, Artificial Sequence
  Synthetically generated peptide
  VARIANT (1)..(17): Xaa = Any Amino Acid
ACEFCANPACXXXTXGC

SEQ ID NO: 11214 - protein, 17 aa, Artificial Sequence
  Synthetically generated peptide
  VARIANT (1)..(17): Xaa = Any Amino Acid
ACEFCANPACXXXTGXC

SEQ ID NO: 11215 - protein, 16 aa, Artificial Sequence
  Synthetically generated peptide
  VARIANT (1)..(16): Xaa = Any Amino Acid
ACEFCANPACXXTXGC

SEQ ID NO: 11216 - protein, 17 aa, Artificial Sequence
  Synthetically generated peptide
  VARIANT (1)..(17): Xaa = Any Amino Acid
ACEFCANPACXXTXXGC

SEQ ID NO: 11217 - protein, 17 aa, Artificial Sequence
  Synthetically generated peptide
  VARIANT (1)..(17): Xaa = Any Amino Acid
ACEFCANPACXXTXGXC

SEQ ID NO: 11218 - protein, 16 aa, Artificial Sequence
  Synthetically generated peptide
  VARIANT (1)..(16): Xaa = Any Amino Acid
ACEFCANPACXXTGXC

SEQ ID NO: 11219 - protein, 17 aa, Artificial Sequence
  Synthetically generated peptide
  VARIANT (1)..(17): Xaa = Any Amino Acid
ACEFCANPACXXTGXXC

SEQ ID NO: 11220 - protein, 15 aa, Artificial Sequence
  Synthetically generated peptide
  VARIANT (1)..(15): Xaa = Any Amino Acid
ACEFCANPACXTXGC

SEQ ID NO: 11221 - protein, 16 aa, Artificial Sequence
  Synthetically generated peptide
  VARIANT (1)..(16): Xaa = Any Amino Acid
ACEFCANPACXTXXGC

SEQ ID NO: 11222 - protein, 17 aa, Artificial Sequence
  Synthetically generated peptide
  VARIANT (1)..(17): Xaa = Any Amino Acid
ACEFCANPACXTXXXGC

SEQ ID NO: 11223 - protein, 17 aa, Artificial Sequence
  Synthetically generated peptide
  VARIANT (1)..(17): Xaa = Any Amino Acid
ACEFCANPACXTXXGXC

SEQ ID NO: 11224 - protein, 16 aa, Artificial Sequence
  Synthetically generated peptide
  VARIANT (1)..(16): Xaa = Any Amino Acid
ACEFCANPACXTXGXC

SEQ ID NO: 11225 - protein, 17 aa, Artificial Sequence
  Synthetically generated peptide
  VARIANT (1)..(17): Xaa = Any Amino Acid
ACEFCANPACXTXGXXC

SEQ ID NO: 11226 - protein, 15 aa, Artificial Sequence
  Synthetically generated peptide
  VARIANT (1)..(15): Xaa = Any Amino Acid
ACEFCANPACXTGXC

SEQ ID NO: 11227 - protein, 16 aa, Artificial Sequence
  Synthetically generated peptide
  VARIANT (1)..(16): Xaa = Any Amino Acid
ACEFCANPACXTGXXC

SEQ ID NO: 11228 - protein, 17 aa, Artificial Sequence
  Synthetically generated peptide
  VARIANT (1)..(17): Xaa = Any Amino Acid
ACEFCANPACXTGXXXC

SEQ ID NO: 11229 - protein, 14 aa, Artificial Sequence
  Synthetically generated peptide
  VARIANT (1)..(14): Xaa = Any Amino Acid
ACEFCANPACTXGC

SEQ ID NO: 11230 - protein, 15 aa, Artificial Sequence
  Synthetically generated peptide
  VARIANT (1)..(15): Xaa = Any Amino Acid
ACEFCANPACTXXGC

SEQ ID NO: 11231 - protein, 16 aa, Artificial Sequence
  Synthetically generated peptide
  VARIANT (1)..(16): Xaa = Any Amino Acid
ACEFCANPACTXXXGC

SEQ ID NO: 11232 - protein, 17 aa, Artificial Sequence
  Synthetically generated peptide
  VARIANT (1)..(17): Xaa = Any Amino Acid
ACEFCANPACTXXXXGC

SEQ ID NO: 11233 - protein, 17 aa, Artificial Sequence
  Synthetically generated peptide
  VARIANT (1)..(17): Xaa = Any Amino Acid
ACEFCANPACTXXXGXC

SEQ ID NO: 11234 - protein, 16 aa, Artificial Sequence
  Synthetically generated peptide
  VARIANT (1)..(16): Xaa = Any Amino Acid
ACEFCANPACTXXGXC

SEQ ID NO: 11235 - protein, 17 aa, Artificial Sequence
  Synthetically generated peptide
  VARIANT (1)..(17): Xaa = Any Amino Acid
ACEFCANPACTXXGXXC

SEQ ID NO: 11236 - protein, 15 aa, Artificial Sequence
  Synthetically generated peptide
  VARIANT (1)..(15): Xaa = Any Amino Acid
ACEFCANPACTXGXC

SEQ ID NO: 11237 - protein, 16 aa, Artificial Sequence
  Synthetically generated peptide
  VARIANT (1)..(16): Xaa = Any Amino Acid
ACEFCANPACTXGXXC

SEQ ID NO: 11238 - protein, 17 aa, Artificial Sequence
  Synthetically generated peptide
  VARIANT (1)..(17): Xaa = Any Amino Acid
ACEFCANPACTXGXXXC

SEQ ID NO: 11239 - protein, 14 aa, Artificial Sequence
  Synthetically generated peptide
  VARIANT (1)..(14): Xaa = Any Amino Acid
ACEFCANPACTGXC

SEQ ID NO: 11240 - protein, 15 aa, Artificial Sequence
  Synthetically generated peptide
  VARIANT (1)..(15): Xaa = Any Amino Acid
ACEFCANPACTGXXC

SEQ ID NO: 11241 - protein, 16 aa, Artificial Sequence
  Synthetically generated peptide
  VARIANT (1)..(16): Xaa = Any Amino Acid
ACEFCANPACTGXXXC

SEQ ID NO: 11242 - protein, 17 aa, Artificial Sequence
  Synthetically generated peptide
  VARIANT (1)..(17): Xaa = Any Amino Acid
ACEFCANPACTGXXXXC

SEQ ID NO: 11243 - protein, 14 aa, Artificial Sequence
  Synthetically generated peptide
  VARIANT (1)..(14): Xaa = Any Amino Acid
CCXEFACNPACTGA

SEQ ID NO: 11244 - protein, 15 aa, Artificial Sequence
  Synthetically generated peptide
  VARIANT (1)..(15): Xaa = Any Amino Acid
CCXXEFACNPACTGA

SEQ ID NO: 11245 - protein, 16 aa, Artificial Sequence
  Synthetically generated peptide
  VARIANT (1)..(16): Xaa = Any Amino Acid
CCXXXEFACNPACTGA

SEQ ID NO: 11246 - protein, 17 aa, Artificial Sequence
  Synthetically generated peptide
  VARIANT (1)..(17): Xaa = Any Amino Acid
CCXXXXEFACNPACTGA

SEQ ID NO: 11247 - protein, 17 aa, Artificial Sequence
  Synthetically generated peptide
  VARIANT (1)..(17): Xaa = Any Amino Acid
CCXXXEXFACNPACTGA

SEQ ID NO: 11248 - protein, 17 aa, Artificial Sequence
  Synthetically generated peptide
  VARIANT (1)..(17): Xaa = Any Amino Acid
CCXXXEFXACNPACTGA

SEQ ID NO: 11249 - protein, 17 aa, Artificial Sequence
  Synthetically generated peptide
  VARIANT (1)..(17): Xaa = Any Amino Acid
CCXXXEFACXNPACTGA

SEQ ID NO: 11250 - protein, 17 aa, Artificial Sequence
  Synthetically generated peptide
  VARIANT (1)..(17): Xaa = Any Amino Acid
CCXXXEFACNXPACTGA

SEQ ID NO: 11251 - protein, 17 aa, Artificial Sequence
  Synthetically generated peptide
  VARIANT (1)..(17): Xaa = Any Amino Acid
CCXXXEFACNPXACTGA

SEQ ID NO: 11252 - protein, 17 aa, Artificial Sequence
  Synthetically generated peptide
  VARIANT (1)..(17): Xaa = Any Amino Acid
CCXXXEFACNPAXCTGA

SEQ ID NO: 11253 - protein, 17 aa, Artificial Sequence
  Synthetically generated peptide
  VARIANT (1)..(17): Xaa = Any Amino Acid
CCXXXEFACNPACXTGA

SEQ ID NO: 11254 - protein, 17 aa, Artificial Sequence
  Synthetically generated peptide
  VARIANT (1)..(17): Xaa = Any Amino Acid
CCXXXEFACNPACTXGA

SEQ ID NO: 11255 - protein, 17 aa, Artificial Sequence
  Synthetically generated peptide
  VARIANT (1)..(17): Xaa = Any Amino Acid
CCXXXEFACNPACTGXA

SEQ ID NO: 11256 - protein, 16 aa, Artificial Sequence
  Synthetically generated peptide
  VARIANT (1)..(16): Xaa = Any Amino Acid
CCXXEXFACNPACTGA

SEQ ID NO: 11257 - protein, 17 aa, Artificial Sequence
  Synthetically generated peptide
  VARIANT (1)..(17): Xaa = Any Amino Acid
CCXXEXXFACNPACTGA

SEQ ID NO: 11258 - protein, 17 aa, Artificial Sequence
  Synthetically generated peptide
  VARIANT (1)..(17): Xaa = Any Amino Acid
CCXXEXFXACNPACTGA

SEQ ID NO: 11259 - protein, 17 aa, Artificial Sequence
  Synthetically generated peptide
  VARIANT (1)..(17): Xaa = Any Amino Acid
CCXXEXFACXNPACTGA

SEQ ID NO: 11260 - protein, 17 aa, Artificial Sequence
  Synthetically generated peptide
  VARIANT (1)..(17): Xaa = Any Amino Acid
CCXXEXFACNXPACTGA

SEQ ID NO: 11261 - protein, 17 aa, Artificial Sequence
  Synthetically generated peptide
  VARIANT (1)..(17): Xaa = Any Amino Acid
CCXXEXFACNPXACTGA

SEQ ID NO: 11262 - protein, 17 aa, Artificial Sequence
  Synthetically generated peptide
  VARIANT (1)..(17): Xaa = Any Amino Acid
CCXXEXFACNPAXCTGA

SEQ ID NO: 11263 - protein, 17 aa, Artificial Sequence
  Synthetically generated peptide
  VARIANT (1)..(17): Xaa = Any Amino Acid
CCXXEXFACNPACXTGA

SEQ ID NO: 11264 - protein, 17 aa, Artificial Sequence
  Synthetically generated peptide
  VARIANT (1)..(17): Xaa = Any Amino Acid
CCXXEXFACNPACTXGA

SEQ ID NO: 11265 - protein, 17 aa, Artificial Sequence
  Synthetically generated peptide
  VARIANT (1)..(17): Xaa = Any Amino Acid
CCXXEXFACNPACTGXA

SEQ ID NO: 11266 - protein, 16 aa, Artificial Sequence
  Synthetically generated peptide
  VARIANT (1)..(16): Xaa = Any Amino Acid
CCXXEFXACNPACTGA

SEQ ID NO: 11267 - protein, 17 aa, Artificial Sequence
  Synthetically generated peptide
  VARIANT (1)..(17): Xaa = Any Amino Acid
CCXXEFXXACNPACTGA

SEQ ID NO: 11268 - protein, 17 aa, Artificial Sequence
  Synthetically generated peptide
  VARIANT (1)..(17): Xaa = Any Amino Acid
CCXXEFXACXNPACTGA

SEQ ID NO: 11269 - protein, 17 aa, Artificial Sequence
  Synthetically generated peptide
  VARIANT (1)..(17): Xaa = Any Amino Acid
CCXXEFXACNXPACTGA

SEQ ID NO: 11270 - protein, 17 aa, Artificial Sequence
  Synthetically generated peptide
  VARIANT (1)..(17): Xaa = Any Amino Acid
CCXXEFXACNPXACTGA

SEQ ID NO: 11271 - protein, 17 aa, Artificial Sequence
  Synthetically generated peptide
  VARIANT (1)..(17): Xaa = Any Amino Acid
CCXXEFXACNPAXCTGA

SEQ ID NO: 11272 - protein, 17 aa, Artificial Sequence
  Synthetically generated peptide
  VARIANT (1)..(17): Xaa = Any Amino Acid
CCXXEFXACNPACXTGA

SEQ ID NO: 11273 - protein, 17 aa, Artificial Sequence
  Synthetically generated peptide
  VARIANT (1)..(17): Xaa = Any Amino Acid
CCXXEFXACNPACTXGA

SEQ ID NO: 11274 - protein, 17 aa, Artificial Sequence
  Synthetically generated peptide
  VARIANT (1)..(17): Xaa = Any Amino Acid
CCXXEFXACNPACTGXA

SEQ ID NO: 11275 - protein, 16 aa, Artificial Sequence
  Synthetically generated peptide
  VARIANT (1)..(16): Xaa = Any Amino Acid
CCXXEFACXNPACTGA

SEQ ID NO: 11276 - protein, 17 aa, Artificial Sequence
  Synthetically generated peptide
  VARIANT (1)..(17): Xaa = Any Amino Acid
CCXXEFACXXNPACTGA

SEQ ID NO: 11277 - protein, 17 aa, Artificial Sequence
  Synthetically generated peptide
  VARIANT (1)..(17): Xaa = Any Amino Acid
CCXXEFACXNXPACTGA

SEQ ID NO: 11278 - protein, 17 aa, Artificial Sequence
  Synthetically generated peptide
  VARIANT (1)..(17): Xaa = Any Amino Acid
CCXXEFACXNPXACTGA

SEQ ID NO: 11279 - protein, 17 aa, Artificial Sequence
  Synthetically generated peptide
  VARIANT (1)..(17): Xaa = Any Amino Acid
CCXXEFACXNPAXCTGA

SEQ ID NO: 11280 - protein, 17 aa, Artificial Sequence
  Synthetically generated peptide
  VARIANT (1)..(17): Xaa = Any Amino Acid
CCXXEFACXNPACXTGA

SEQ ID NO: 11281 - protein, 17 aa, Artificial Sequence
  Synthetically generated peptide
  VARIANT (1)..(17): Xaa = Any Amino Acid
CCXXEFACXNPACTXGA

SEQ ID NO: 11282 - protein, 17 aa, Artificial Sequence
  Synthetically generated peptide
  VARIANT (1)..(17): Xaa = Any Amino Acid
CCXXEFACXNPACTGXA

SEQ ID NO: 11283 - protein, 16 aa, Artificial Sequence
  Synthetically generated peptide
  VARIANT (1)..(16): Xaa = Any Amino Acid
CCXXEFACNXPACTGA

SEQ ID NO: 11284 - protein, 17 aa, Artificial Sequence
  Synthetically generated peptide
  VARIANT (1)..(17): Xaa = Any Amino Acid
CCXXEFACNXXPACTGA

SEQ ID NO: 11285 - protein, 17 aa, Artificial Sequence
  Synthetically generated peptide
  VARIANT (1)..(17): Xaa = Any Amino Acid
CCXXEFACNXPXACTGA

SEQ ID NO: 11286 - protein, 17 aa, Artificial Sequence
  Synthetically generated peptide
  VARIANT (1)..(17): Xaa = Any Amino Acid
CCXXEFACNXPAXCTGA

SEQ ID NO: 11287 - protein, 17 aa, Artificial Sequence
  Synthetically generated peptide
  VARIANT (1)..(17): Xaa = Any Amino Acid
CCXXEFACNXPACXTGA

SEQ ID NO: 11288 - protein, 17 aa, Artificial Sequence
  Synthetically generated peptide
  VARIANT (1)..(17): Xaa = Any Amino Acid
CCXXEFACNXPACTXGA

SEQ ID NO: 11289 - protein, 17 aa, Artificial Sequence
  Synthetically generated peptide
  VARIANT (1)..(17): Xaa = Any Amino Acid
CCXXEFACNXPACTGXA

SEQ ID NO: 11290 - protein, 16 aa, Artificial Sequence
  Synthetically generated peptide
  VARIANT (1)..(16): Xaa = Any Amino Acid
CCXXEFACNPXACTGA

SEQ ID NO: 11291 - protein, 17 aa, Artificial Sequence
  Synthetically generated peptide
  VARIANT (1)..(17): Xaa = Any Amino Acid
CCXXEFACNPXXACTGA

SEQ ID NO: 11292 - protein, 17 aa, Artificial Sequence
  Synthetically generated peptide
  VARIANT (1)..(17): Xaa = Any Amino Acid
CCXXEFACNPXAXCTGA

SEQ ID NO: 11293 - protein, 17 aa, Artificial Sequence
  Synthetically generated peptide
  VARIANT (1)..(17): Xaa = Any Amino Acid
CCXXEFACNPXACXTGA

SEQ ID NO: 11294 - protein, 17 aa, Artificial Sequence
  Synthetically generated peptide
  VARIANT (1)..(17): Xaa = Any Amino Acid
CCXXEFACNPXACTXGA

SEQ ID NO: 11295 - protein, 17 aa, Artificial Sequence
  Synthetically generated peptide
  VARIANT (1)..(17): Xaa = Any Amino Acid
CCXXEFACNPXACTGXA

SEQ ID NO: 11296 - protein, 16 aa, Artificial Sequence
  Synthetically generated peptide
  VARIANT (1)..(16): Xaa = Any Amino Acid
CCXXEFACNPAXCTGA

SEQ ID NO: 11297 - protein, 17 aa, Artificial Sequence
  Synthetically generated peptide
  VARIANT (1)..(17): Xaa = Any Amino Acid
CCXXEFACNPAXXCTGA

SEQ ID NO: 11298 - protein, 17 aa, Artificial Sequence
  Synthetically generated peptide
  VARIANT (1)..(17): Xaa = Any Amino Acid
CCXXEFACNPAXCXTGA

SEQ ID NO: 11299 - protein, 17 aa, Artificial Sequence
  Synthetically generated peptide
  VARIANT (1)..(17): Xaa = Any Amino Acid
CCXXEFACNPAXCTXGA

SEQ ID NO: 11300 - protein, 17 aa, Artificial Sequence
  Synthetically generated peptide
  VARIANT (1)..(17): Xaa = Any Amino Acid
CCXXEFACNPAXCTGXA

SEQ ID NO: 11301 - protein, 16 aa, Artificial Sequence
  Synthetically generated peptide
  VARIANT (1)..(16): Xaa = Any Amino Acid
CCXXEFACNPACXTGA

SEQ ID NO: 11302 - protein, 17 aa, Artificial Sequence
  Synthetically generated peptide
  VARIANT (1)..(17): Xaa = Any Amino Acid
CCXXEFACNPACXXTGA

SEQ ID NO: 11303 - protein, 17 aa, Artificial Sequence
  Synthetically generated peptide
  VARIANT (1)..(17): Xaa = Any Amino Acid
CCXXEFACNPACXTXGA

SEQ ID NO: 11304 - protein, 17 aa, Artificial Sequence
  Synthetically generated peptide
  VARIANT (1)..(17): Xaa = Any Amino Acid
CCXXEFACNPACXTGXA

SEQ ID NO: 11305 - protein, 16 aa, Artificial Sequence
  Synthetically generated peptide
  VARIANT (1)..(16): Xaa = Any Amino Acid
CCXXEFACNPACTXGA

SEQ ID NO: 11306 - protein, 17 aa, Artificial Sequence
  Synthetically generated peptide
  VARIANT (1)..(17): Xaa = Any Amino Acid
CCXXEFACNPACTXXGA

SEQ ID NO: 11307 - protein, 17 aa, Artificial Sequence
  Synthetically generated peptide
  VARIANT (1)..(17): Xaa = Any Amino Acid
CCXXEFACNPACTXGXA

SEQ ID NO: 11308 - protein, 16 aa, Artificial Sequence
  Synthetically generated peptide
  VARIANT (1)..(16): Xaa = Any Amino Acid
CCXXEFACNPACTGXA

SEQ ID NO: 11309 - protein, 17 aa, Artificial Sequence
  Synthetically generated peptide
  VARIANT (1)..(17): Xaa = Any Amino Acid
CCXXEFACNPACTGXXA

SEQ ID NO: 11310 - protein, 15 aa, Artificial Sequence
  Synthetically generated peptide
  VARIANT (1)..(15): Xaa = Any Amino Acid
CCXEXFACNPACTGA

SEQ ID NO: 11311 - protein, 16 aa, Artificial Sequence
  Synthetically generated peptide
  VARIANT (1)..(16): Xaa = Any Amino Acid
CCXEXXFACNPACTGA

SEQ ID NO: 11312 - protein, 17 aa, Artificial Sequence
  Synthetically generated peptide
  VARIANT (1)..(17): Xaa = Any Amino Acid
CCXEXXXFACNPACTGA

SEQ ID NO: 11313 - protein, 17 aa, Artificial Sequence
  Synthetically generated peptide
  VARIANT (1)..(17): Xaa = Any Amino Acid
CCXEXXFXACNPACTGA

SEQ ID NO: 11314 - protein, 17 aa, Artificial Sequence
  Synthetically generated peptide
  VARIANT (1)..(17): Xaa = Any Amino Acid
CCXEXXFACXNPACTGA

SEQ ID NO: 11315 - protein, 17 aa, Artificial Sequence
  Synthetically generated peptide
  VARIANT (1)..(17): Xaa = Any Amino Acid
CCXEXXFACNXPACTGA

SEQ ID NO: 11316 - protein, 17 aa, Artificial Sequence
  Synthetically generated peptide
  VARIANT (1)..(17): Xaa = Any Amino Acid
CCXEXXFACNPXACTGA

SEQ ID NO: 11317 - protein, 17 aa, Artificial Sequence
  Synthetically generated peptide
  VARIANT (1)..(17): Xaa = Any Amino Acid
CCXEXXFACNPAXCTGA

SEQ ID NO: 11318 - protein, 17 aa, Artificial Sequence
  Synthetically generated peptide
  VARIANT (1)..(17): Xaa = Any Amino Acid
CCXEXXFACNPACXTGA

SEQ ID NO: 11319 - protein, 17 aa, Artificial Sequence
  Synthetically generated peptide
  VARIANT (1)..(17): Xaa = Any Amino Acid
CCXEXXFACNPACTXGA

SEQ ID NO: 11320 - protein, 17 aa, Artificial Sequence
  Synthetically generated peptide
  VARIANT (1)..(17): Xaa = Any Amino Acid
CCXEXXFACNPACTGXA

SEQ ID NO: 11321 - protein, 16 aa, Artificial Sequence
  Synthetically generated peptide
  VARIANT (1)..(16): Xaa = Any Amino Acid
CCXEXFXACNPACTGA

SEQ ID NO: 11322 - protein, 17 aa, Artificial Sequence
  Synthetically generated peptide
  VARIANT (1)..(17): Xaa = Any Amino Acid
CCXEXFXXACNPACTGA

SEQ ID NO: 11323 - protein, 17 aa, Artificial Sequence
  Synthetically generated peptide
  VARIANT (1)..(17): Xaa = Any Amino Acid
CCXEXFXACXNPACTGA

SEQ ID NO: 11324 - protein, 17 aa, Artificial Sequence
  Synthetically generated peptide
  VARIANT (1)..(17): Xaa = Any Amino Acid
CCXEXFXACNXPACTGA

SEQ ID NO: 11325 - protein, 17 aa, Artificial Sequence
  Synthetically generated peptide
  VARIANT (1)..(17): Xaa = Any Amino Acid
CCXEXFXACNPXACTGA

SEQ ID NO: 11326 - protein, 17 aa, Artificial Sequence
  Synthetically generated peptide
  VARIANT (1)..(17): Xaa = Any Amino Acid
CCXEXFXACNPAXCTGA

SEQ ID NO: 11327 - protein, 17 aa, Artificial Sequence
  Synthetically generated peptide
  VARIANT (1)..(17): Xaa = Any Amino Acid
CCXEXFXACNPACXTGA

SEQ ID NO: 11328 - protein, 17 aa, Artificial Sequence
  Synthetically generated peptide
  VARIANT (1)..(17): Xaa = Any Amino Acid
CCXEXFXACNPACTXGA

SEQ ID NO: 11329 - protein, 17 aa, Artificial Sequence
  Synthetically generated peptide
  VARIANT (1)..(17): Xaa = Any Amino Acid
CCXEXFXACNPACTGXA

SEQ ID NO: 11330 - protein, 16 aa, Artificial Sequence
  Synthetically generated peptide
  VARIANT (1)..(16): Xaa = Any Amino Acid
CCXEXFACXNPACTGA

SEQ ID NO: 11331 - protein, 17 aa, Artificial Sequence
  Synthetically generated peptide
  VARIANT (1)..(17): Xaa = Any Amino Acid
CCXEXFACXXNPACTGA

SEQ ID NO: 11332 - protein, 17 aa, Artificial Sequence
  Synthetically generated peptide
  VARIANT (1)..(17): Xaa = Any Amino Acid
CCXEXFACXNXPACTGA

SEQ ID NO: 11333 - protein, 17 aa, Artificial Sequence
  Synthetically generated peptide
  VARIANT (1)..(17): Xaa = Any Amino Acid
CCXEXFACXNPXACTGA

SEQ ID NO: 11334 - protein, 17 aa, Artificial Sequence
  Synthetically generated peptide
  VARIANT (1)..(17): Xaa = Any Amino Acid
CCXEXFACXNPAXCTGA

SEQ ID NO: 11335 - protein, 17 aa, Artificial Sequence
  Synthetically generated peptide
  VARIANT (1)..(17): Xaa = Any Amino Acid
CCXEXFACXNPACXTGA

SEQ ID NO: 11336 - protein, 17 aa, Artificial Sequence
  Synthetically generated peptide
  VARIANT (1)..(17): Xaa = Any Amino Acid
CCXEXFACXNPACTXGA

SEQ ID NO: 11337 - protein, 17 aa, Artificial Sequence
  Synthetically generated peptide
  VARIANT (1)..(17): Xaa = Any Amino Acid
CCXEXFACXNPACTGXA

SEQ ID NO: 11338 - protein, 16 aa, Artificial Sequence
  Synthetically generated peptide
  VARIANT (1)..(16): Xaa = Any Amino Acid
CCXEXFACNXPACTGA

SEQ ID NO: 11339 - protein, 17 aa, Artificial Sequence
  Synthetically generated peptide
  VARIANT (1)..(17): Xaa = Any Amino Acid
CCXEXFACNXXPACTGA

SEQ ID NO: 11340 - protein, 17 aa, Artificial Sequence
  Synthetically generated peptide
  VARIANT (1)..(17): Xaa = Any Amino Acid
CCXEXFACNXPXACTGA

SEQ ID NO: 11341 - protein, 17 aa, Artificial Sequence
  Synthetically generated peptide
  VARIANT (1)..(17): Xaa = Any Amino Acid
CCXEXFACNXPAXCTGA

SEQ ID NO: 11342 - protein, 17 aa, Artificial Sequence
  Synthetically generated peptide
  VARIANT (1)..(17): Xaa = Any Amino Acid
CCXEXFACNXPACXTGA

SEQ ID NO: 11343 - protein, 17 aa, Artificial Sequence
  Synthetically generated peptide
  VARIANT (1)..(17): Xaa = Any Amino Acid
CCXEXFACNXPACTXGA

SEQ ID NO: 11344 - protein, 17 aa, Artificial Sequence
  Synthetically generated peptide
  VARIANT (1)..(17): Xaa = Any Amino Acid
CCXEXFACNXPACTGXA

SEQ ID NO: 11345 - protein, 16 aa, Artificial Sequence
  Synthetically generated peptide
  VARIANT (1)..(16): Xaa = Any Amino Acid
CCXEXFACNPXACTGA

SEQ ID NO: 11346 - protein, 17 aa, Artificial Sequence
  Synthetically generated peptide
  VARIANT (1)..(17): Xaa = Any Amino Acid
CCXEXFACNPXXACTGA

SEQ ID NO: 11347 - protein, 17 aa, Artificial Sequence
  Synthetically generated peptide
  VARIANT (1)..(17): Xaa = Any Amino Acid
CCXEXFACNPXAXCTGA

SEQ ID NO: 11348 - protein, 17 aa, Artificial Sequence
  Synthetically generated peptide
  VARIANT (1)..(17): Xaa = Any Amino Acid
CCXEXFACNPXACXTGA

SEQ ID NO: 11349 - protein, 17 aa, Artificial Sequence
  Synthetically generated peptide
  VARIANT (1)..(17): Xaa = Any Amino Acid
CCXEXFACNPXACTXGA

SEQ ID NO: 11350 - protein, 17 aa, Artificial Sequence
  Synthetically generated peptide
  VARIANT (1)..(17): Xaa = Any Amino Acid
CCXEXFACNPXACTGXA

SEQ ID NO: 11351 - protein, 16 aa, Artificial Sequence
  Synthetically generated peptide
  VARIANT (1)..(16): Xaa = Any Amino Acid
CCXEXFACNPAXCTGA

SEQ ID NO: 11352 - protein, 17 aa, Artificial Sequence
  Synthetically generated peptide
  VARIANT (1)..(17): Xaa = Any Amino Acid
CCXEXFACNPAXXCTGA

SEQ ID NO: 11353 - protein, 17 aa, Artificial Sequence
  Synthetically generated peptide
  VARIANT (1)..(17): Xaa = Any Amino Acid
CCXEXFACNPAXCXTGA

SEQ ID NO: 11354 - protein, 17 aa, Artificial Sequence
  Synthetically generated peptide
  VARIANT (1)..(17): Xaa = Any Amino Acid
CCXEXFACNPAXCTXGA

SEQ ID NO: 11355 - protein, 17 aa, Artificial Sequence
  Synthetically generated peptide
  VARIANT (1)..(17): Xaa = Any Amino Acid
CCXEXFACNPAXCTGXA

SEQ ID NO: 11356 - protein, 16 aa, Artificial Sequence
  Synthetically generated peptide
  VARIANT (1)..(16): Xaa = Any Amino Acid
CCXEXFACNPACXTGA

SEQ ID NO: 11357 - protein, 17 aa, Artificial Sequence
  Synthetically generated peptide
  VARIANT (1)..(17): Xaa = Any Amino Acid
CCXEXFACNPACXXTGA

SEQ ID NO: 11358 - protein, 17 aa, Artificial Sequence
  Synthetically generated peptide
  VARIANT (1)..(17): Xaa = Any Amino Acid
CCXEXFACNPACXTXGA

SEQ ID NO: 11359 - protein, 17 aa, Artificial Sequence
  Synthetically generated peptide
  VARIANT (1)..(17): Xaa = Any Amino Acid
CCXEXFACNPACXTGXA

SEQ ID NO: 11360 - protein, 16 aa, Artificial Sequence
  Synthetically generated peptide
  VARIANT (1)..(16): Xaa = Any Amino Acid
CCXEXFACNPACTXGA

SEQ ID NO: 11361 - protein, 17 aa, Artificial Sequence
  Synthetically generated peptide
  VARIANT (1)..(17): Xaa = Any Amino Acid
CCXEXFACNPACTXXGA

SEQ ID NO: 11362 - protein, 17 aa, Artificial Sequence
  Synthetically generated peptide
  VARIANT (1)..(17): Xaa = Any Amino Acid
CCXEXFACNPACTXGXA

SEQ ID NO: 11363 - protein, 16 aa, Artificial Sequence
  Synthetically generated peptide
  VARIANT (1)..(16): Xaa = Any Amino Acid
CCXEXFACNPACTGXA

SEQ ID NO: 11364 - protein, 17 aa, Artificial Sequence
  Synthetically generated peptide
  VARIANT (1)..(17): Xaa = Any Amino Acid
CCXEXFACNPACTGXXA

SEQ ID NO: 11365 - protein, 15 aa, Artificial Sequence
  Synthetically generated peptide
  VARIANT (1)..(15): Xaa = Any Amino Acid
CCXEFXACNPACTGA

SEQ ID NO: 11366 - protein, 16 aa, Artificial Sequence
  Synthetically generated peptide
  VARIANT (1)..(16): Xaa = Any Amino Acid
CCXEFXXACNPACTGA

SEQ ID NO: 11367 - protein, 17 aa, Artificial Sequence
  Synthetically generated peptide
  VARIANT (1)..(17): Xaa = Any Amino Acid
CCXEFXXXACNPACTGA

SEQ ID NO: 11368 - protein, 17 aa, Artificial Sequence
  Synthetically generated peptide
  VARIANT (1)..(17): Xaa = Any Amino Acid
CCXEFXXACXNPACTGA

SEQ ID NO: 11369 - protein, 17 aa, Artificial Sequence
  Synthetically generated peptide
  VARIANT (1)..(17): Xaa = Any Amino Acid
CCXEFXXACNXPACTGA

SEQ ID NO: 11370 - protein, 17 aa, Artificial Sequence
  Synthetically generated peptide
  VARIANT (1)..(17): Xaa = Any Amino Acid
CCXEFXXACNPXACTGA

SEQ ID NO: 11371 - protein, 17 aa, Artificial Sequence
  Synthetically generated peptide
  VARIANT (1)..(17): Xaa = Any Amino Acid
CCXEFXXACNPAXCTGA

SEQ ID NO: 11372 - protein, 17 aa, Artificial Sequence
  Synthetically generated peptide
  VARIANT (1)..(17): Xaa = Any Amino Acid
CCXEFXXACNPACXTGA

SEQ ID NO: 11373 - protein, 17 aa, Artificial Sequence
  Synthetically generated peptide
  VARIANT (1)..(17): Xaa = Any Amino Acid
CCXEFXXACNPACTXGA

SEQ ID NO: 11374 - protein, 17 aa, Artificial Sequence
  Synthetically generated peptide
  VARIANT (1)..(17): Xaa = Any Amino Acid
CCXEFXXACNPACTGXA

SEQ ID NO: 11375 - protein, 16 aa, Artificial Sequence
  Synthetically generated peptide
  VARIANT (1)..(16): Xaa = Any Amino Acid
CCXEFXACXNPACTGA

SEQ ID NO: 11376 - protein, 17 aa, Artificial Sequence
  Synthetically generated peptide
  VARIANT (1)..(17): Xaa = Any Amino Acid
CCXEFXACXXNPACTGA

SEQ ID NO: 11377 - protein, 17 aa, Artificial Sequence
  Synthetically generated peptide
  VARIANT (1)..(17): Xaa = Any Amino Acid
CCXEFXACXNXPACTGA

SEQ ID NO: 11378 - protein, 17 aa, Artificial Sequence
  Synthetically generated peptide
  VARIANT (1)..(17): Xaa = Any Amino Acid
CCXEFXACXNPXACTGA

SEQ ID NO: 11379 - protein, 17 aa, Artificial Sequence
  Synthetically generated peptide
  VARIANT (1)..(17): Xaa = Any Amino Acid
CCXEFXACXNPAXCTGA

SEQ ID NO: 11380 - protein, 17 aa, Artificial Sequence
  Synthetically generated peptide
  VARIANT (1)..(17): Xaa = Any Amino Acid
CCXEFXACXNPACXTGA

SEQ ID NO: 11381 - protein, 17 aa, Artificial Sequence
  Synthetically generated peptide
  VARIANT (1)..(17): Xaa = Any Amino Acid
CCXEFXACXNPACTXGA

SEQ ID NO: 11382 - protein, 17 aa, Artificial Sequence
  Synthetically generated peptide
  VARIANT (1)..(17): Xaa = Any Amino Acid
CCXEFXACXNPACTGXA

SEQ ID NO: 11383 - protein, 16 aa, Artificial Sequence
  Synthetically generated peptide
  VARIANT (1)..(16): Xaa = Any Amino Acid
CCXEFXACNXPACTGA

SEQ ID NO: 11384 - protein, 17 aa, Artificial Sequence
  Synthetically generated peptide
  VARIANT (1)..(17): Xaa = Any Amino Acid
CCXEFXACNXXPACTGA

SEQ ID NO: 11385 - protein, 17 aa, Artificial Sequence
  Synthetically generated peptide
  VARIANT (1)..(17): Xaa = Any Amino Acid
CCXEFXACNXPXACTGA

SEQ ID NO: 11386 - protein, 17 aa, Artificial Sequence
  Synthetically generated peptide
  VARIANT (1)..(17): Xaa = Any Amino Acid
CCXEFXACNXPAXCTGA

SEQ ID NO: 11387 - protein, 17 aa, Artificial Sequence
  Synthetically generated peptide
  VARIANT (1)..(17): Xaa = Any Amino Acid
CCXEFXACNXPACXTGA

SEQ ID NO: 11388 - protein, 17 aa, Artificial Sequence
  Synthetically generated peptide
  VARIANT (1)..(17): Xaa = Any Amino Acid
CCXEFXACNXPACTXGA

SEQ ID NO: 11389 - protein, 17 aa, Artificial Sequence
  Synthetically generated peptide
  VARIANT (1)..(17): Xaa = Any Amino Acid
CCXEFXACNXPACTGXA

SEQ ID NO: 11390 - protein, 16 aa, Artificial Sequence
  Synthetically generated peptide
  VARIANT (1)..(16): Xaa = Any Amino Acid
CCXEFXACNPXACTGA

SEQ ID NO: 11391 - protein, 17 aa, Artificial Sequence
  Synthetically generated peptide
  VARIANT (1)..(17): Xaa = Any Amino Acid
CCXEFXACNPXXACTGA

SEQ ID NO: 11392 - protein, 17 aa, Artificial Sequence
  Synthetically generated peptide
  VARIANT (1)..(17): Xaa = Any Amino Acid
CCXEFXACNPXAXCTGA

SEQ ID NO: 11393 - protein, 17 aa, Artificial Sequence
  Synthetically generated peptide
  VARIANT (1)..(17): Xaa = Any Amino Acid
CCXEFXACNPXACXTGA

SEQ ID NO: 11394 - protein, 17 aa, Artificial Sequence
  Synthetically generated peptide
  VARIANT (1)..(17): Xaa = Any Amino Acid
CCXEFXACNPXACTXGA

SEQ ID NO: 11395 - protein, 17 aa, Artificial Sequence
  Synthetically generated peptide
  VARIANT (1)..(17): Xaa = Any Amino Acid
CCXEFXACNPXACTGXA

SEQ ID NO: 11396 - protein, 16 aa, Artificial Sequence
  Synthetically generated peptide
  VARIANT (1)..(16): Xaa = Any Amino Acid
CCXEFXACNPAXCTGA

SEQ ID NO: 11397 - protein, 17 aa, Artificial Sequence
  Synthetically generated peptide
  VARIANT (1)..(17): Xaa = Any Amino Acid
CCXEFXACNPAXXCTGA

SEQ ID NO: 11398 - protein, 17 aa, Artificial Sequence
  Synthetically generated peptide
  VARIANT (1)..(17): Xaa = Any Amino Acid
CCXEFXACNPAXCXTGA

SEQ ID NO: 11399 - protein, 17 aa, Artificial Sequence
  Synthetically generated peptide
  VARIANT (1)..(17): Xaa = Any Amino Acid
CCXEFXACNPAXCTXGA

SEQ ID NO: 11400 - protein, 17 aa, Artificial Sequence
  Synthetically generated peptide
  VARIANT (1)..(17): Xaa = Any Amino Acid
CCXEFXACNPAXCTGXA

SEQ ID NO: 11401 - protein, 16 aa, Artificial Sequence
  Synthetically generated peptide
  VARIANT (1)..(16): Xaa = Any Amino Acid
CCXEFXACNPACXTGA

SEQ ID NO: 11402 - protein, 17 aa, Artificial Sequence
  Synthetically generated peptide
  VARIANT (1)..(17): Xaa = Any Amino Acid
CCXEFXACNPACXXTGA

SEQ ID NO: 11403 - protein, 17 aa, Artificial Sequence
  Synthetically generated peptide
  VARIANT (1)..(17): Xaa = Any Amino Acid
CCXEFXACNPACXTXGA

SEQ ID NO: 11404 - protein, 17 aa, Artificial Sequence
  Synthetically generated peptide
  VARIANT (1)..(17): Xaa = Any Amino Acid
CCXEFXACNPACXTGXA

SEQ ID NO: 11405 - protein, 16 aa, Artificial Sequence
  Synthetically generated peptide
  VARIANT (1)..(16): Xaa = Any Amino Acid
CCXEFXACNPACTXGA

SEQ ID NO: 11406 - protein, 17 aa, Artificial Sequence
  Synthetically generated peptide
  VARIANT (1)..(17): Xaa = Any Amino Acid
CCXEFXACNPACTXXGA

SEQ ID NO: 11407 - protein, 17 aa, Artificial Sequence
  Synthetically generated peptide
  VARIANT (1)..(17): Xaa = Any Amino Acid
CCXEFXACNPACTXGXA

SEQ ID NO: 11408 - protein, 16 aa, Artificial Sequence
  Synthetically generated peptide
  VARIANT (1)..(16): Xaa = Any Amino Acid
CCXEFXACNPACTGXA

SEQ ID NO: 11409 - protein, 17 aa, Artificial Sequence
  Synthetically generated peptide
  VARIANT (1)..(17): Xaa = Any Amino Acid
CCXEFXACNPACTGXXA

SEQ ID NO: 11410 - protein, 15 aa, Artificial Sequence
  Synthetically generated peptide
  VARIANT (1)..(15): Xaa = Any Amino Acid
CCXEFACXNPACTGA

SEQ ID NO: 11411 - protein, 16 aa, Artificial Sequence
  Synthetically generated peptide
  VARIANT (1)..(16): Xaa = Any Amino Acid
CCXEFACXXNPACTGA

SEQ ID NO: 11412 - protein, 17 aa, Artificial Sequence
  Synthetically generated peptide
  VARIANT (1)..(17): Xaa = Any Amino Acid
CCXEFACXXXNPACTGA

SEQ ID NO: 11413 - protein, 17 aa, Artificial Sequence
  Synthetically generated peptide
  VARIANT (1)..(17): Xaa = Any Amino Acid
CCXEFACXXNXPACTGA

SEQ ID NO: 11414 - protein, 17 aa, Artificial Sequence
  Synthetically generated peptide
  VARIANT (1)..(17): Xaa = Any Amino Acid
CCXEFACXXNPXACTGA

SEQ ID NO: 11415 - protein, 17 aa, Artificial Sequence
  Synthetically generated peptide
  VARIANT (1)..(17): Xaa = Any Amino Acid
CCXEFACXXNPAXCTGA

SEQ ID NO: 11416 - protein, 17 aa, Artificial Sequence
  Synthetically generated peptide
  VARIANT (1)..(17): Xaa = Any Amino Acid
CCXEFACXXNPACXTGA

SEQ ID NO: 11417 - protein, 17 aa, Artificial Sequence
  Synthetically generated peptide
  VARIANT (1)..(17): Xaa = Any Amino Acid
CCXEFACXXNPACTXGA

SEQ ID NO: 11418 - protein, 17 aa, Artificial Sequence
  Synthetically generated peptide
  VARIANT (1)..(17): Xaa = Any Amino Acid
CCXEFACXXNPACTGXA

SEQ ID NO: 11419 - protein, 16 aa, Artificial Sequence
  Synthetically generated peptide
  VARIANT (1)..(16): Xaa = Any Amino Acid
CCXEFACXNXPACTGA

SEQ ID NO: 11420 - protein, 17 aa, Artificial Sequence
  Synthetically generated peptide
  VARIANT (1)..(17): Xaa = Any Amino Acid
CCXEFACXNXXPACTGA

SEQ ID NO: 11421 - protein, 17 aa, Artificial Sequence
  Synthetically generated peptide
  VARIANT (1)..(17): Xaa = Any Amino Acid
CCXEFACXNXPXACTGA

SEQ ID NO: 11422 - protein, 17 aa, Artificial Sequence
  Synthetically generated peptide
  VARIANT (1)..(17): Xaa = Any Amino Acid
CCXEFACXNXPAXCTGA

SEQ ID NO: 11423 - protein, 17 aa, Artificial Sequence
  Synthetically generated peptide
  VARIANT (1)..(17): Xaa = Any Amino Acid
CCXEFACXNXPACXTGA

SEQ ID NO: 11424 - protein, 17 aa, Artificial Sequence
  Synthetically generated peptide
  VARIANT (1)..(17): Xaa = Any Amino Acid
CCXEFACXNXPACTXGA

SEQ ID NO: 11425 - protein, 17 aa, Artificial Sequence
  Synthetically generated peptide
  VARIANT (1)..(17): Xaa = Any Amino Acid
CCXEFACXNXPACTGXA

SEQ ID NO: 11426 - protein, 16 aa, Artificial Sequence
  Synthetically generated peptide
  VARIANT (1)..(16): Xaa = Any Amino Acid
CCXEFACXNPXACTGA

SEQ ID NO: 11427 - protein, 17 aa, Artificial Sequence
  Synthetically generated peptide
  VARIANT (1)..(17): Xaa = Any Amino Acid
CCXEFACXNPXXACTGA

SEQ ID NO: 11428 - protein, 17 aa, Artificial Sequence
  Synthetically generated peptide
  VARIANT (1)..(17): Xaa = Any Amino Acid
CCXEFACXNPXAXCTGA

SEQ ID NO: 11429 - protein, 17 aa, Artificial Sequence
  Synthetically generated peptide
  VARIANT (1)..(17): Xaa = Any Amino Acid
CCXEFACXNPXACXTGA

SEQ ID NO: 11430 - protein, 17 aa, Artificial Sequence
  Synthetically generated peptide
  VARIANT (1)..(17): Xaa = Any Amino Acid
CCXEFACXNPXACTXGA

SEQ ID NO: 11431 - protein, 17 aa, Artificial Sequence
  Synthetically generated peptide
  VARIANT (1)..(17): Xaa = Any Amino Acid
CCXEFACXNPXACTGXA

SEQ ID NO: 11432 - protein, 16 aa, Artificial Sequence
  Synthetically generated peptide
  VARIANT (1)..(16): Xaa = Any Amino Acid
CCXEFACXNPAXCTGA

SEQ ID NO: 11433 - protein, 17 aa, Artificial Sequence
  Synthetically generated peptide
  VARIANT (1)..(17): Xaa = Any Amino Acid
CCXEFACXNPAXXCTGA

SEQ ID NO: 11434 - protein, 17 aa, Artificial Sequence
  Synthetically generated peptide
  VARIANT (1)..(17): Xaa = Any Amino Acid
CCXEFACXNPAXCXTGA

SEQ ID NO: 11435 - protein, 17 aa, Artificial Sequence
  Synthetically generated peptide
  VARIANT (1)..(17): Xaa = Any Amino Acid
CCXEFACXNPAXCTXGA

SEQ ID NO: 11436 - protein, 17 aa, Artificial Sequence
  Synthetically generated peptide
  VARIANT (1)..(17): Xaa = Any Amino Acid
CCXEFACXNPAXCTGXA

SEQ ID NO: 11437 - protein, 16 aa, Artificial Sequence
  Synthetically generated peptide
  VARIANT (1)..(16): Xaa = Any Amino Acid
CCXEFACXNPACXTGA

SEQ ID NO: 11438 - protein, 17 aa, Artificial Sequence
  Synthetically generated peptide
  VARIANT (1)..(17): Xaa = Any Amino Acid
CCXEFACXNPACXXTGA

SEQ ID NO: 11439 - protein, 17 aa, Artificial Sequence
  Synthetically generated peptide
  VARIANT (1)..(17): Xaa = Any Amino Acid
CCXEFACXNPACXTXGA

SEQ ID NO: 11440 - protein, 17 aa, Artificial Sequence
  Synthetically generated peptide
  VARIANT (1)..(17): Xaa = Any Amino Acid
CCXEFACXNPACXTGXA

SEQ ID NO: 11441 - protein, 16 aa, Artificial Sequence
  Synthetically generated peptide
  VARIANT (1)..(16): Xaa = Any Amino Acid
CCXEFACXNPACTXGA

SEQ ID NO: 11442 - protein, 17 aa, Artificial Sequence
  Synthetically generated peptide
  VARIANT (1)..(17): Xaa = Any Amino Acid
CCXEFACXNPACTXXGA

SEQ ID NO: 11443 - protein, 17 aa, Artificial Sequence
  Synthetically generated peptide
  VARIANT (1)..(17): Xaa = Any Amino Acid
CCXEFACXNPACTXGXA

SEQ ID NO: 11444 - protein, 16 aa, Artificial Sequence
  Synthetically generated peptide
  VARIANT (1)..(16): Xaa = Any Amino Acid
CCXEFACXNPACTGXA

SEQ ID NO: 11445 - protein, 17 aa, Artificial Sequence
  Synthetically generated peptide
  VARIANT (1)..(17): Xaa = Any Amino Acid
CCXEFACXNPACTGXXA

SEQ ID NO: 11446 - protein, 15 aa, Artificial Sequence
  Synthetically generated peptide
  VARIANT (1)..(15): Xaa = Any Amino Acid
CCXEFACNXPACTGA

SEQ ID NO: 11447 - protein, 16 aa, Artificial Sequence
  Synthetically generated peptide
  VARIANT (1)..(16): Xaa = Any Amino Acid
CCXEFACNXXPACTGA

SEQ ID NO: 11448 - protein, 17 aa, Artificial Sequence
  Synthetically generated peptide
  VARIANT (1)..(17): Xaa = Any Amino Acid
CCXEFACNXXXPACTGA

SEQ ID NO: 11449 - protein, 17 aa, Artificial Sequence
  Synthetically generated peptide
  VARIANT (1)..(17): Xaa = Any Amino Acid
CCXEFACNXXPXACTGA

SEQ ID NO: 11450 - protein, 17 aa, Artificial Sequence
  Synthetically generated peptide
  VARIANT (1)..(17): Xaa = Any Amino Acid
CCXEFACNXXPAXCTGA

SEQ ID NO: 11451 - protein, 17 aa, Artificial Sequence
  Synthetically generated peptide
  VARIANT (1)..(17): Xaa = Any Amino Acid
CCXEFACNXXPACXTGA

SEQ ID NO: 11452 - protein, 17 aa, Artificial Sequence
  Synthetically generated peptide
  VARIANT (1)..(17): Xaa = Any Amino Acid
CCXEFACNXXPACTXGA

SEQ ID NO: 11453 - protein, 17 aa, Artificial Sequence
  Synthetically generated peptide
  VARIANT (1)..(17): Xaa = Any Amino Acid
CCXEFACNXXPACTGXA

SEQ ID NO: 11454 - protein, 16 aa, Artificial Sequence
  Synthetically generated peptide
  VARIANT (1)..(16): Xaa = Any Amino Acid
CCXEFACNXPXACTGA

SEQ ID NO: 11455 - protein, 17 aa, Artificial Sequence
  Synthetically generated peptide
  VARIANT (1)..(17): Xaa = Any Amino Acid
CCXEFACNXPXXACTGA

SEQ ID NO: 11456 - protein, 17 aa, Artificial Sequence
  Synthetically generated peptide
  VARIANT (1)..(17): Xaa = Any Amino Acid
CCXEFACNXPXAXCTGA

SEQ ID NO: 11457 - protein, 17 aa, Artificial Sequence
  Synthetically generated peptide
  VARIANT (1)..(17): Xaa = Any Amino Acid
CCXEFACNXPXACXTGA

SEQ ID NO: 11458 - protein, 17 aa, Artificial Sequence
  Synthetically generated peptide
  VARIANT (1)..(17): Xaa = Any Amino Acid
CCXEFACNXPXACTXGA

SEQ ID NO: 11459 - protein, 17 aa, Artificial Sequence
  Synthetically generated peptide
  VARIANT (1)..(17): Xaa = Any Amino Acid
CCXEFACNXPXACTGXA

SEQ ID NO: 11460 - protein, 16 aa, Artificial Sequence
  Synthetically generated peptide
  VARIANT (1)..(16): Xaa = Any Amino Acid
CCXEFACNXPAXCTGA

SEQ ID NO: 11461 - protein, 17 aa, Artificial Sequence
  Synthetically generated peptide
  VARIANT (1)..(17): Xaa = Any Amino Acid
CCXEFACNXPAXXCTGA

SEQ ID NO: 11462 - protein, 17 aa, Artificial Sequence
  Synthetically generated peptide
  VARIANT (1)..(17): Xaa = Any Amino Acid
CCXEFACNXPAXCXTGA

SEQ ID NO: 11463 - protein, 17 aa, Artificial Sequence
  Synthetically generated peptide
  VARIANT (1)..(17): Xaa = Any Amino Acid
CCXEFACNXPAXCTXGA

SEQ ID NO: 11464 - protein, 17 aa, Artificial Sequence
  Synthetically generated peptide
  VARIANT (1)..(17): Xaa = Any Amino Acid
CCXEFACNXPAXCTGXA

SEQ ID NO: 11465 - protein, 16 aa, Artificial Sequence
  Synthetically generated peptide
  VARIANT (1)..(16): Xaa = Any Amino Acid
CCXEFACNXPACXTGA

SEQ ID NO: 11466 - protein, 17 aa, Artificial Sequence
  Synthetically generated peptide
  VARIANT (1)..(17): Xaa = Any Amino Acid
CCXEFACNXPACXXTGA

SEQ ID NO: 11467 - protein, 17 aa, Artificial Sequence
  Synthetically generated peptide
  VARIANT (1)..(17): Xaa = Any Amino Acid
CCXEFACNXPACXTXGA

SEQ ID NO: 11468 - protein, 17 aa, Artificial Sequence
  Synthetically generated peptide
  VARIANT (1)..(17): Xaa = Any Amino Acid
CCXEFACNXPACXTGXA

SEQ ID NO: 11469 - protein, 16 aa, Artificial Sequence
  Synthetically generated peptide
  VARIANT (1)..(16): Xaa = Any Amino Acid
CCXEFACNXPACTXGA

SEQ ID NO: 11470 - protein, 17 aa, Artificial Sequence
  Synthetically generated peptide
  VARIANT (1)..(17): Xaa = Any Amino Acid
CCXEFACNXPACTXXGA

SEQ ID NO: 11471 - protein, 17 aa, Artificial Sequence
  Synthetically generated peptide
  VARIANT (1)..(17): Xaa = Any Amino Acid
CCXEFACNXPACTXGXA

SEQ ID NO: 11472 - protein, 16 aa, Artificial Sequence
  Synthetically generated peptide
  VARIANT (1)..(16): Xaa = Any Amino Acid
CCXEFACNXPACTGXA

SEQ ID NO: 11473 - protein, 17 aa, Artificial Sequence
  Synthetically generated peptide
  VARIANT (1)..(17): Xaa = Any Amino Acid
CCXEFACNXPACTGXXA

SEQ ID NO: 11474 - protein, 15 aa, Artificial Sequence
  Synthetically generated peptide
  VARIANT (1)..(15): Xaa = Any Amino Acid
CCXEFACNPXACTGA

SEQ ID NO: 11475 - protein, 16 aa, Artificial Sequence
  Synthetically generated peptide
  VARIANT (1)..(16): Xaa = Any Amino Acid
CCXEFACNPXXACTGA

SEQ ID NO: 11476 - protein, 17 aa, Artificial Sequence
  Synthetically generated peptide
  VARIANT (1)..(17): Xaa = Any Amino Acid
CCXEFACNPXXXACTGA

SEQ ID NO: 11477 - protein, 17 aa, Artificial Sequence
  Synthetically generated peptide
  VARIANT (1)..(17): Xaa = Any Amino Acid
CCXEFACNPXXAXCTGA

SEQ ID NO: 11478 - protein, 17 aa, Artificial Sequence
  Synthetically generated peptide
  VARIANT (1)..(17): Xaa = Any Amino Acid
CCXEFACNPXXACXTGA

SEQ ID NO: 11479 - protein, 17 aa, Artificial Sequence
  Synthetically generated peptide
  VARIANT (1)..(17): Xaa = Any Amino Acid
CCXEFACNPXXACTXGA

SEQ ID NO: 11480 - protein, 17 aa, Artificial Sequence
  Synthetically generated peptide
  VARIANT (1)..(17): Xaa = Any Amino Acid
CCXEFACNPXXACTGXA

SEQ ID NO: 11481 - protein, 16 aa, Artificial Sequence
  Synthetically generated peptide
  VARIANT (1)..(16): Xaa = Any Amino Acid
CCXEFACNPXAXCTGA

SEQ ID NO: 11482 - protein, 17 aa, Artificial Sequence
  Synthetically generated peptide
  VARIANT (1)..(17): Xaa = Any Amino Acid
CCXEFACNPXAXXCTGA

SEQ ID NO: 11483 - protein, 17 aa, Artificial Sequence
  Synthetically generated peptide
  VARIANT (1)..(17): Xaa = Any Amino Acid
CCXEFACNPXAXCXTGA

SEQ ID NO: 11484 - protein, 17 aa, Artificial Sequence
  Synthetically generated peptide
  VARIANT (1)..(17): Xaa = Any Amino Acid
CCXEFACNPXAXCTXGA

SEQ ID NO: 11485 - protein, 17 aa, Artificial Sequence
  Synthetically generated peptide
  VARIANT (1)..(17): Xaa = Any Amino Acid
CCXEFACNPXAXCTGXA

SEQ ID NO: 11486 - protein, 16 aa, Artificial Sequence
  Synthetically generated peptide
  VARIANT (1)..(16): Xaa = Any Amino Acid
CCXEFACNPXACXTGA

SEQ ID NO: 11487 - protein, 17 aa, Artificial Sequence
  Synthetically generated peptide
  VARIANT (1)..(17): Xaa = Any Amino Acid
CCXEFACNPXACXXTGA

SEQ ID NO: 11488 - protein, 17 aa, Artificial Sequence
  Synthetically generated peptide
  VARIANT (1)..(17): Xaa = Any Amino Acid
CCXEFACNPXACXTXGA

SEQ ID NO: 11489 - protein, 17 aa, Artificial Sequence
  Synthetically generated peptide
  VARIANT (1)..(17): Xaa = Any Amino Acid
CCXEFACNPXACXTGXA

SEQ ID NO: 11490 - protein, 16 aa, Artificial Sequence
  Synthetically generated peptide
  VARIANT (1)..(16): Xaa = Any Amino Acid
CCXEFACNPXACTXGA

SEQ ID NO: 11491 - protein, 17 aa, Artificial Sequence
  Synthetically generated peptide
  VARIANT (1)..(17): Xaa = Any Amino Acid
CCXEFACNPXACTXXGA

SEQ ID NO: 11492 - protein, 17 aa, Artificial Sequence
  Synthetically generated peptide
  VARIANT (1)..(17): Xaa = Any Amino Acid
CCXEFACNPXACTXGXA

SEQ ID NO: 11493 - protein, 16 aa, Artificial Sequence
  Synthetically generated peptide
  VARIANT (1)..(16): Xaa = Any Amino Acid
CCXEFACNPXACTGXA

SEQ ID NO: 11494 - protein, 17 aa, Artificial Sequence
  Synthetically generated peptide
  VARIANT (1)..(17): Xaa = Any Amino Acid
CCXEFACNPXACTGXXA

SEQ ID NO: 11495 - protein, 15 aa, Artificial Sequence
  Synthetically generated peptide
  VARIANT (1)..(15): Xaa = Any Amino Acid
CCXEFACNPAXCTGA

SEQ ID NO: 11496 - protein, 16 aa, Artificial Sequence
  Synthetically generated peptide
  VARIANT (1)..(16): Xaa = Any Amino Acid
CCXEFACNPAXXCTGA

SEQ ID NO: 11497 - protein, 17 aa, Artificial Sequence
  Synthetically generated peptide
  VARIANT (1)..(17): Xaa = Any Amino Acid
CCXEFACNPAXXXCTGA

SEQ ID NO: 11498 - protein, 17 aa, Artificial Sequence
  Synthetically generated peptide
  VARIANT (1)..(17): Xaa = Any Amino Acid
CCXEFACNPAXXCXTGA

SEQ ID NO: 11499 - protein, 17 aa, Artificial Sequence
  Synthetically generated peptide
  VARIANT (1)..(17): Xaa = Any Amino Acid
CCXEFACNPAXXCTXGA

SEQ ID NO: 11500 - protein, 17 aa, Artificial Sequence
  Synthetically generated peptide
  VARIANT (1)..(17): Xaa = Any Amino Acid
CCXEFACNPAXXCTGXA

SEQ ID NO: 11501 - protein, 16 aa, Artificial Sequence
  Synthetically generated peptide
  VARIANT (1)..(16): Xaa = Any Amino Acid
CCXEFACNPAXCXTGA

SEQ ID NO: 11502 - protein, 17 aa, Artificial Sequence
  Synthetically generated peptide
  VARIANT (1)..(17): Xaa = Any Amino Acid
CCXEFACNPAXCXXTGA

SEQ ID NO: 11503 - protein, 17 aa, Artificial Sequence
  Synthetically generated peptide
  VARIANT (1)..(17): Xaa = Any Amino Acid
CCXEFACNPAXCXTXGA

SEQ ID NO: 11504 - protein, 17 aa, Artificial Sequence
  Synthetically generated peptide
  VARIANT (1)..(17): Xaa = Any Amino Acid
CCXEFACNPAXCXTGXA

SEQ ID NO: 11505 - protein, 16 aa, Artificial Sequence
  Synthetically generated peptide
  VARIANT (1)..(16): Xaa = Any Amino Acid
CCXEFACNPAXCTXGA

SEQ ID NO: 11506 - protein, 17 aa, Artificial Sequence
  Synthetically generated peptide
  VARIANT (1)..(17): Xaa = Any Amino Acid
CCXEFACNPAXCTXXGA

SEQ ID NO: 11507 - protein, 17 aa, Artificial Sequence
  Synthetically generated peptide
  VARIANT (1)..(17): Xaa = Any Amino Acid
CCXEFACNPAXCTXGXA

SEQ ID NO: 11508 - protein, 16 aa, Artificial Sequence
  Synthetically generated peptide
  VARIANT (1)..(16): Xaa = Any Amino Acid
CCXEFACNPAXCTGXA

SEQ ID NO: 11509 - protein, 17 aa, Artificial Sequence
  Synthetically generated peptide
  VARIANT (1)..(17): Xaa = Any Amino Acid
CCXEFACNPAXCTGXXA

SEQ ID NO: 11510 - protein, 15 aa, Artificial Sequence
  Synthetically generated peptide
  VARIANT (1)..(15): Xaa = Any Amino Acid
CCXEFACNPACXTGA

SEQ ID NO: 11511 - protein, 16 aa, Artificial Sequence
  Synthetically generated peptide
  VARIANT (1)..(16): Xaa = Any Amino Acid
CCXEFACNPACXXTGA

SEQ ID NO: 11512 - protein, 17 aa, Artificial Sequence
  Synthetically generated peptide
  VARIANT (1)..(17): Xaa = Any Amino Acid
CCXEFACNPACXXXTGA

SEQ ID NO: 11513 - protein, 17 aa, Artificial Sequence
  Synthetically generated peptide
  VARIANT (1)..(17): Xaa = Any Amino Acid
CCXEFACNPACXXTXGA

SEQ ID NO: 11514 - protein, 17 aa, Artificial Sequence
  Synthetically generated peptide
  VARIANT (1)..(17): Xaa = Any Amino Acid
CCXEFACNPACXXTGXA

SEQ ID NO: 11515 - protein, 16 aa, Artificial Sequence
  Synthetically generated peptide
  VARIANT (1)..(16): Xaa = Any Amino Acid
CCXEFACNPACXTXGA

SEQ ID NO: 11516 - protein, 17 aa, Artificial Sequence
  Synthetically generated peptide
  VARIANT (1)..(17): Xaa = Any Amino Acid
CCXEFACNPACXTXXGA

SEQ ID NO: 11517 - protein, 17 aa, Artificial Sequence
  Synthetically generated peptide
  VARIANT (1)..(17): Xaa = Any Amino Acid
CCXEFACNPACXTXGXA

SEQ ID NO: 11518 - protein, 16 aa, Artificial Sequence
  Synthetically generated peptide
  VARIANT (1)..(16): Xaa = Any Amino Acid
CCXEFACNPACXTGXA

SEQ ID NO: 11519 - protein, 17 aa, Artificial Sequence
  Synthetically generated peptide
  VARIANT (1)..(17): Xaa = Any Amino Acid
CCXEFACNPACXTGXXA

SEQ ID NO: 11520 - protein, 15 aa, Artificial Sequence
  Synthetically generated peptide
  VARIANT (1)..(15): Xaa = Any Amino Acid
CCXEFACNPACTXGA

SEQ ID NO: 11521 - protein, 16 aa, Artificial Sequence
  Synthetically generated peptide
  VARIANT (1)..(16): Xaa = Any Amino Acid
CCXEFACNPACTXXGA

SEQ ID NO: 11522 - protein, 17 aa, Artificial Sequence
  Synthetically generated peptide
  VARIANT (1)..(17): Xaa = Any Amino Acid
CCXEFACNPACTXXXGA

SEQ ID NO: 11523 - protein, 17 aa, Artificial Sequence
  Synthetically generated peptide
  VARIANT (1)..(17): Xaa = Any Amino Acid
CCXEFACNPACTXXGXA

SEQ ID NO: 11524 - protein, 16 aa, Artificial Sequence
  Synthetically generated peptide
  VARIANT (1)..(16): Xaa = Any Amino Acid
CCXEFACNPACTXGXA

SEQ ID NO: 11525 - protein, 17 aa, Artificial Sequence
  Synthetically generated peptide
  VARIANT (1)..(17): Xaa = Any Amino Acid
CCXEFACNPACTXGXXA

SEQ ID NO: 11526 - protein, 15 aa, Artificial Sequence
  Synthetically generated peptide
  VARIANT (1)..(15): Xaa = Any Amino Acid
CCXEFACNPACTGXA

SEQ ID NO: 11527 - protein, 16 aa, Artificial Sequence
  Synthetically generated peptide
  VARIANT (1)..(16): Xaa = Any Amino Acid
CCXEFACNPACTGXXA

SEQ ID NO: 11528 - protein, 17 aa, Artificial Sequence
  Synthetically generated peptide
  VARIANT (1)..(17): Xaa = Any Amino Acid
CCXEFACNPACTGXXXA

SEQ ID NO: 11529 - protein, 14 aa, Artificial Sequence
  Synthetically generated peptide
  VARIANT (1)..(14): Xaa = Any Amino Acid
CCEXFACNPACTGA

SEQ ID NO: 11530 - protein, 15 aa, Artificial Sequence
  Synthetically generated peptide
  VARIANT (1)..(15): Xaa = Any Amino Acid
CCEXXFACNPACTGA

SEQ ID NO: 11531 - protein, 16 aa, Artificial Sequence
  Synthetically generated peptide
  VARIANT (1)..(16): Xaa = Any Amino Acid
CCEXXXFACNPACTGA

SEQ ID NO: 11532 - protein, 17 aa, Artificial Sequence
  Synthetically generated peptide
  VARIANT (1)..(17): Xaa = Any Amino Acid
CCEXXXXFACNPACTGA

SEQ ID NO: 11533 - protein, 17 aa, Artificial Sequence
  Synthetically generated peptide
  VARIANT (1)..(17): Xaa = Any Amino Acid
CCEXXXFXACNPACTGA

SEQ ID NO: 11534 - protein, 17 aa, Artificial Sequence
  Synthetically generated peptide
  VARIANT (1)..(17): Xaa = Any Amino Acid
CCEXXXFACXNPACTGA

SEQ ID NO: 11535 - protein, 17 aa, Artificial Sequence
  Synthetically generated peptide
  VARIANT (1)..(17): Xaa = Any Amino Acid
CCEXXXFACNXPACTGA

SEQ ID NO: 11536 - protein, 17 aa, Artificial Sequence
  Synthetically generated peptide
  VARIANT (1)..(17): Xaa = Any Amino Acid
CCEXXXFACNPXACTGA

SEQ ID NO: 11537 - protein, 17 aa, Artificial Sequence
  Synthetically generated peptide
  VARIANT (1)..(17): Xaa = Any Amino Acid
CCEXXXFACNPAXCTGA

SEQ ID NO: 11538 - protein, 17 aa, Artificial Sequence
  Synthetically generated peptide
  VARIANT (1)..(17): Xaa = Any Amino Acid
CCEXXXFACNPACXTGA

SEQ ID NO: 11539 - protein, 17 aa, Artificial Sequence
  Synthetically generated peptide
  VARIANT (1)..(17): Xaa = Any Amino Acid
CCEXXXFACNPACTXGA

SEQ ID NO: 11540 - protein, 17 aa, Artificial Sequence
  Synthetically generated peptide
  VARIANT (1)..(17): Xaa = Any Amino Acid
CCEXXXFACNPACTGXA

SEQ ID NO: 11541 - protein, 16 aa, Artificial Sequence
  Synthetically generated peptide
  VARIANT (1)..(16): Xaa = Any Amino Acid
CCEXXFXACNPACTGA

SEQ ID NO: 11542 - protein, 17 aa, Artificial Sequence
  Synthetically generated peptide
  VARIANT (1)..(17): Xaa = Any Amino Acid
CCEXXFXXACNPACTGA

SEQ ID NO: 11543 - protein, 17 aa, Artificial Sequence
  Synthetically generated peptide
  VARIANT (1)..(17): Xaa = Any Amino Acid
CCEXXFXACXNPACTGA

SEQ ID NO: 11544 - protein, 17 aa, Artificial Sequence
  Synthetically generated peptide
  VARIANT (1)..(17): Xaa = Any Amino Acid
CCEXXFXACNXPACTGA

SEQ ID NO: 11545 - protein, 17 aa, Artificial Sequence
  Synthetically generated peptide
  VARIANT (1)..(17): Xaa = Any Amino Acid
CCEXXFXACNPXACTGA

SEQ ID NO: 11546 - protein, 17 aa, Artificial Sequence
  Synthetically generated peptide
  VARIANT (1)..(17): Xaa = Any Amino Acid
CCEXXFXACNPAXCTGA

SEQ ID NO: 11547 - protein, 17 aa, Artificial Sequence
  Synthetically generated peptide
  VARIANT (1)..(17): Xaa = Any Amino Acid
CCEXXFXACNPACXTGA

SEQ ID NO: 11548 - protein, 17 aa, Artificial Sequence
  Synthetically generated peptide
  VARIANT (1)..(17): Xaa = Any Amino Acid
CCEXXFXACNPACTXGA

SEQ ID NO: 11549 - protein, 17 aa, Artificial Sequence
  Synthetically generated peptide
  VARIANT (1)..(17): Xaa = Any Amino Acid
CCEXXFXACNPACTGXA

SEQ ID NO: 11550 - protein, 16 aa, Artificial Sequence
  Synthetically generated peptide
  VARIANT (1)..(16): Xaa = Any Amino Acid
CCEXXFACXNPACTGA

SEQ ID NO: 11551 - protein, 17 aa, Artificial Sequence
  Synthetically generated peptide
  VARIANT (1)..(17): Xaa = Any Amino Acid
CCEXXFACXXNPACTGA

SEQ ID NO: 11552 - protein, 17 aa, Artificial Sequence
  Synthetically generated peptide
  VARIANT (1)..(17): Xaa = Any Amino Acid
CCEXXFACXNXPACTGA

SEQ ID NO: 11553 - protein, 17 aa, Artificial Sequence
  Synthetically generated peptide
  VARIANT (1)..(17): Xaa = Any Amino Acid
CCEXXFACXNPXACTGA

SEQ ID NO: 11554 - protein, 17 aa, Artificial Sequence
  Synthetically generated peptide
  VARIANT (1)..(17): Xaa = Any Amino Acid
CCEXXFACXNPAXCTGA

SEQ ID NO: 11555 - protein, 17 aa, Artificial Sequence
  Synthetically generated peptide
  VARIANT (1)..(17): Xaa = Any Amino Acid
CCEXXFACXNPACXTGA

SEQ ID NO: 11556 - protein, 17 aa, Artificial Sequence
  Synthetically generated peptide
  VARIANT (1)..(17): Xaa = Any Amino Acid
CCEXXFACXNPACTXGA

SEQ ID NO: 11557 - protein, 17 aa, Artificial Sequence
  Synthetically generated peptide
  VARIANT (1)..(17): Xaa = Any Amino Acid
CCEXXFACXNPACTGXA

SEQ ID NO: 11558 - protein, 16 aa, Artificial Sequence
  Synthetically generated peptide
  VARIANT (1)..(16): Xaa = Any Amino Acid
CCEXXFACNXPACTGA

SEQ ID NO: 11559 - protein, 17 aa, Artificial Sequence
  Synthetically generated peptide
  VARIANT (1)..(17): Xaa = Any Amino Acid
CCEXXFACNXXPACTGA

SEQ ID NO: 11560 - protein, 17 aa, Artificial Sequence
  Synthetically generated peptide
  VARIANT (1)..(17): Xaa = Any Amino Acid
CCEXXFACNXPXACTGA

SEQ ID NO: 11561 - protein, 17 aa, Artificial Sequence
  Synthetically generated peptide
  VARIANT (1)..(17): Xaa = Any Amino Acid
CCEXXFACNXPAXCTGA

SEQ ID NO: 11562 - protein, 17 aa, Artificial Sequence
  Synthetically generated peptide
  VARIANT (1)..(17): Xaa = Any Amino Acid
CCEXXFACNXPACXTGA

SEQ ID NO: 11563 - protein, 17 aa, Artificial Sequence
  Synthetically generated peptide
  VARIANT (1)..(17): Xaa = Any Amino Acid
CCEXXFACNXPACTXGA

SEQ ID NO: 11564 - protein, 17 aa, Artificial Sequence
  Synthetically generated peptide
  VARIANT (1)..(17): Xaa = Any Amino Acid
CCEXXFACNXPACTGXA

SEQ ID NO: 11565 - protein, 16 aa, Artificial Sequence
  Synthetically generated peptide
  VARIANT (1)..(16): Xaa = Any Amino Acid
CCEXXFACNPXACTGA

SEQ ID NO: 11566 - protein, 17 aa, Artificial Sequence
  Synthetically generated peptide
  VARIANT (1)..(17): Xaa = Any Amino Acid
CCEXXFACNPXXACTGA

SEQ ID NO: 11567 - protein, 17 aa, Artificial Sequence
  Synthetically generated peptide
  VARIANT (1)..(17): Xaa = Any Amino Acid
CCEXXFACNPXAXCTGA

SEQ ID NO: 11568 - protein, 17 aa, Artificial Sequence
  Synthetically generated peptide
  VARIANT (1)..(17): Xaa = Any Amino Acid
CCEXXFACNPXACXTGA

SEQ ID NO: 11569 - protein, 17 aa, Artificial Sequence
  Synthetically generated peptide
  VARIANT (1)..(17): Xaa = Any Amino Acid
CCEXXFACNPXACTXGA

SEQ ID NO: 11570 - protein, 17 aa, Artificial Sequence
  Synthetically generated peptide
  VARIANT (1)..(17): Xaa = Any Amino Acid
CCEXXFACNPXACTGXA

SEQ ID NO: 11571 - protein, 16 aa, Artificial Sequence
  Synthetically generated peptide
  VARIANT (1)..(16): Xaa = Any Amino Acid
CCEXXFACNPAXCTGA

SEQ ID NO: 11572 - protein, 17 aa, Artificial Sequence
  Synthetically generated peptide
  VARIANT (1)..(17): Xaa = Any Amino Acid
CCEXXFACNPAXXCTGA

SEQ ID NO: 11573 - protein, 17 aa, Artificial Sequence
  Synthetically generated peptide
  VARIANT (1)..(17): Xaa = Any Amino Acid
CCEXXFACNPAXCXTGA

SEQ ID NO: 11574 - protein, 17 aa, Artificial Sequence
  Synthetically generated peptide
  VARIANT (1)..(17): Xaa = Any Amino Acid
CCEXXFACNPAXCTXGA

SEQ ID NO: 11575 - protein, 17 aa, Artificial Sequence
  Synthetically generated peptide
  VARIANT (1)..(17): Xaa = Any Amino Acid
CCEXXFACNPAXCTGXA

SEQ ID NO: 11576 - protein, 16 aa, Artificial Sequence
  Synthetically generated peptide
  VARIANT (1)..(16): Xaa = Any Amino Acid
CCEXXFACNPACXTGA

SEQ ID NO: 11577 - protein, 17 aa, Artificial Sequence
  Synthetically generated peptide
  VARIANT (1)..(17): Xaa = Any Amino Acid
CCEXXFACNPACXXTGA

SEQ ID NO: 11578 - protein, 17 aa, Artificial Sequence
  Synthetically generated peptide
  VARIANT (1)..(17): Xaa = Any Amino Acid
CCEXXFACNPACXTXGA

SEQ ID NO: 11579 - protein, 17 aa, Artificial Sequence
  Synthetically generated peptide
  VARIANT (1)..(17): Xaa = Any Amino Acid
CCEXXFACNPACXTGXA

SEQ ID NO: 11580 - protein, 16 aa, Artificial Sequence
  Synthetically generated peptide
  VARIANT (1)..(16): Xaa = Any Amino Acid
CCEXXFACNPACTXGA

SEQ ID NO: 11581 - protein, 17 aa, Artificial Sequence
  Synthetically generated peptide
  VARIANT (1)..(17): Xaa = Any Amino Acid
CCEXXFACNPACTXXGA

SEQ ID NO: 11582 - protein, 17 aa, Artificial Sequence
  Synthetically generated peptide
  VARIANT (1)..(17): Xaa = Any Amino Acid
CCEXXFACNPACTXGXA

SEQ ID NO: 11583 - protein, 16 aa, Artificial Sequence
  Synthetically generated peptide
  VARIANT (1)..(16): Xaa = Any Amino Acid
CCEXXFACNPACTGXA

SEQ ID NO: 11584 - protein, 17 aa, Artificial Sequence
  Synthetically generated peptide
  VARIANT (1)..(17): Xaa = Any Amino Acid
CCEXXFACNPACTGXXA

SEQ ID NO: 11585 - protein, 15 aa, Artificial Sequence
  Synthetically generated peptide
  VARIANT (1)..(15): Xaa = Any Amino Acid
CCEXFXACNPACTGA

SEQ ID NO: 11586 - protein, 16 aa, Artificial Sequence
  Synthetically generated peptide
  VARIANT (1)..(16): Xaa = Any Amino Acid
CCEXFXXACNPACTGA

SEQ ID NO: 11587 - protein, 17 aa, Artificial Sequence
  Synthetically generated peptide
  VARIANT (1)..(17): Xaa = Any Amino Acid
CCEXFXXXACNPACTGA

SEQ ID NO: 11588 - protein, 17 aa, Artificial Sequence
  Synthetically generated peptide
  VARIANT (1)..(17): Xaa = Any Amino Acid
CCEXFXXACXNPACTGA

SEQ ID NO: 11589 - protein, 17 aa, Artificial Sequence
  Synthetically generated peptide
  VARIANT (1)..(17): Xaa = Any Amino Acid
CCEXFXXACNXPACTGA

SEQ ID NO: 11590 - protein, 17 aa, Artificial Sequence
  Synthetically generated peptide
  VARIANT (1)..(17): Xaa = Any Amino Acid
CCEXFXXACNPXACTGA

SEQ ID NO: 11591 - protein, 17 aa, Artificial Sequence
  Synthetically generated peptide
  VARIANT (1)..(17): Xaa = Any Amino Acid
CCEXFXXACNPAXCTGA

SEQ ID NO: 11592 - protein, 17 aa, Artificial Sequence
  Synthetically generated peptide
  VARIANT (1)..(17): Xaa = Any Amino Acid
CCEXFXXACNPACXTGA

SEQ ID NO: 11593 - protein, 17 aa, Artificial Sequence
  Synthetically generated peptide
  VARIANT (1)..(17): Xaa = Any Amino Acid
CCEXFXXACNPACTXGA

SEQ ID NO: 11594 - protein, 17 aa, Artificial Sequence
  Synthetically generated peptide
  VARIANT (1)..(17): Xaa = Any Amino Acid
CCEXFXXACNPACTGXA

SEQ ID NO: 11595 - protein, 16 aa, Artificial Sequence
  Synthetically generated peptide
  VARIANT (1)..(16): Xaa = Any Amino Acid
CCEXFXACXNPACTGA

SEQ ID NO: 11596 - protein, 17 aa, Artificial Sequence
  Synthetically generated peptide
  VARIANT (1)..(17): Xaa = Any Amino Acid
CCEXFXACXXNPACTGA

SEQ ID NO: 11597 - protein, 17 aa, Artificial Sequence
  Synthetically generated peptide
  VARIANT (1)..(17): Xaa = Any Amino Acid
CCEXFXACXNXPACTGA

SEQ ID NO: 11598 - protein, 17 aa, Artificial Sequence
  Synthetically generated peptide
  VARIANT (1)..(17): Xaa = Any Amino Acid
CCEXFXACXNPXACTGA

SEQ ID NO: 11599 - protein, 17 aa, Artificial Sequence
  Synthetically generated peptide
  VARIANT (1)..(17): Xaa = Any Amino Acid
CCEXFXACXNPAXCTGA

SEQ ID NO: 11600 - protein, 17 aa, Artificial Sequence
  Synthetically generated peptide
  VARIANT (1)..(17): Xaa = Any Amino Acid
CCEXFXACXNPACXTGA

SEQ ID NO: 11601 - protein, 17 aa, Artificial Sequence
  Synthetically generated peptide
  VARIANT (1)..(17): Xaa = Any Amino Acid
CCEXFXACXNPACTXGA

SEQ ID NO: 11602 - protein, 17 aa, Artificial Sequence
  Synthetically generated peptide
  VARIANT (1)..(17): Xaa = Any Amino Acid
CCEXFXACXNPACTGXA

SEQ ID NO: 11603 - protein, 16 aa, Artificial Sequence
  Synthetically generated peptide
  VARIANT (1)..(16): Xaa = Any Amino Acid
CCEXFXACNXPACTGA

SEQ ID NO: 11604 - protein, 17 aa, Artificial Sequence
  Synthetically generated peptide
  VARIANT (1)..(17): Xaa = Any Amino Acid
CCEXFXACNXXPACTGA

SEQ ID NO: 11605 - protein, 17 aa, Artificial Sequence
  Synthetically generated peptide
  VARIANT (1)..(17): Xaa = Any Amino Acid
CCEXFXACNXPXACTGA

SEQ ID NO: 11606 - protein, 17 aa, Artificial Sequence
  Synthetically generated peptide
  VARIANT (1)..(17): Xaa = Any Amino Acid
CCEXFXACNXPAXCTGA

SEQ ID NO: 11607 - protein, 17 aa, Artificial Sequence
  Synthetically generated peptide
  VARIANT (1)..(17): Xaa = Any Amino Acid
CCEXFXACNXPACXTGA

SEQ ID NO: 11608 - protein, 17 aa, Artificial Sequence
  Synthetically generated peptide
  VARIANT (1)..(17): Xaa = Any Amino Acid
CCEXFXACNXPACTXGA

SEQ ID NO: 11609 - protein, 17 aa, Artificial Sequence
  Synthetically generated peptide
  VARIANT (1)..(17): Xaa = Any Amino Acid
CCEXFXACNXPACTGXA

SEQ ID NO: 11610 - protein, 16 aa, Artificial Sequence
  Synthetically generated peptide
  VARIANT (1)..(16): Xaa = Any Amino Acid
CCEXFXACNPXACTGA

SEQ ID NO: 11611 - protein, 17 aa, Artificial Sequence
  Synthetically generated peptide
  VARIANT (1)..(17): Xaa = Any Amino Acid
CCEXFXACNPXXACTGA

SEQ ID NO: 11612 - protein, 17 aa, Artificial Sequence
  Synthetically generated peptide
  VARIANT (1)..(17): Xaa = Any Amino Acid
CCEXFXACNPXAXCTGA

SEQ ID NO: 11613 - protein, 17 aa, Artificial Sequence
  Synthetically generated peptide
  VARIANT (1)..(17): Xaa = Any Amino Acid
CCEXFXACNPXACXTGA

SEQ ID NO: 11614 - protein, 17 aa, Artificial Sequence
  Synthetically generated peptide
  VARIANT (1)..(17): Xaa = Any Amino Acid
CCEXFXACNPXACTXGA

SEQ ID NO: 11615 - protein, 17 aa, Artificial Sequence
  Synthetically generated peptide
  VARIANT (1)..(17): Xaa = Any Amino Acid
CCEXFXACNPXACTGXA

SEQ ID NO: 11616 - protein, 16 aa, Artificial Sequence
  Synthetically generated peptide
  VARIANT (1)..(16): Xaa = Any Amino Acid
CCEXFXACNPAXCTGA

SEQ ID NO: 11617 - protein, 17 aa, Artificial Sequence
  Synthetically generated peptide
  VARIANT (1)..(17): Xaa = Any Amino Acid
CCEXFXACNPAXXCTGA

SEQ ID NO: 11618 - protein, 17 aa, Artificial Sequence
  Synthetically generated peptide
  VARIANT (1)..(17): Xaa = Any Amino Acid
CCEXFXACNPAXCXTGA

SEQ ID NO: 11619 - protein, 17 aa, Artificial Sequence
  Synthetically generated peptide
  VARIANT (1)..(17): Xaa = Any Amino Acid
CCEXFXACNPAXCTXGA

SEQ ID NO: 11620 - protein, 17 aa, Artificial Sequence
  Synthetically generated peptide
  VARIANT (1)..(17): Xaa = Any Amino Acid
CCEXFXACNPAXCTGXA

SEQ ID NO: 11621 - protein, 16 aa, Artificial Sequence
  Synthetically generated peptide
  VARIANT (1)..(16): Xaa = Any Amino Acid
CCEXFXACNPACXTGA

SEQ ID NO: 11622 - protein, 17 aa, Artificial Sequence
  Synthetically generated peptide
  VARIANT (1)..(17): Xaa = Any Amino Acid
CCEXFXACNPACXXTGA

SEQ ID NO: 11623 - protein, 17 aa, Artificial Sequence
  Synthetically generated peptide
  VARIANT (1)..(17): Xaa = Any Amino Acid
CCEXFXACNPACXTXGA

SEQ ID NO: 11624 - protein, 17 aa, Artificial Sequence
  Synthetically generated peptide
  VARIANT (1)..(17): Xaa = Any Amino Acid
CCEXFXACNPACXTGXA

SEQ ID NO: 11625 - protein, 16 aa, Artificial Sequence
  Synthetically generated peptide
  VARIANT (1)..(16): Xaa = Any Amino Acid
CCEXFXACNPACTXGA

SEQ ID NO: 11626 - protein, 17 aa, Artificial Sequence
  Synthetically generated peptide
  VARIANT (1)..(17): Xaa = Any Amino Acid
CCEXFXACNPACTXXGA

SEQ ID NO: 11627 - protein, 17 aa, Artificial Sequence
  Synthetically generated peptide
  VARIANT (1)..(17): Xaa = Any Amino Acid
CCEXFXACNPACTXGXA

SEQ ID NO: 11628 - protein, 16 aa, Artificial Sequence
  Synthetically generated peptide
  VARIANT (1)..(16): Xaa = Any Amino Acid
CCEXFXACNPACTGXA

SEQ ID NO: 11629 - protein, 17 aa, Artificial Sequence
  Synthetically generated peptide
  VARIANT (1)..(17): Xaa = Any Amino Acid
CCEXFXACNPACTGXXA

SEQ ID NO: 11630 - protein, 15 aa, Artificial Sequence
  Synthetically generated peptide
  VARIANT (1)..(15): Xaa = Any Amino Acid
CCEXFACXNPACTGA

SEQ ID NO: 11631 - protein, 16 aa, Artificial Sequence
  Synthetically generated peptide
  VARIANT (1)..(16): Xaa = Any Amino Acid
CCEXFACXXNPACTGA

SEQ ID NO: 11632 - protein, 17 aa, Artificial Sequence
  Synthetically generated peptide
  VARIANT (1)..(17): Xaa = Any Amino Acid
CCEXFACXXXNPACTGA

SEQ ID NO: 11633 - protein, 17 aa, Artificial Sequence
  Synthetically generated peptide
  VARIANT (1)..(17): Xaa = Any Amino Acid
CCEXFACXXNXPACTGA

SEQ ID NO: 11634 - protein, 17 aa, Artificial Sequence
  Synthetically generated peptide
  VARIANT (1)..(17): Xaa = Any Amino Acid
CCEXFACXXNPXACTGA

SEQ ID NO: 11635 - protein, 17 aa, Artificial Sequence
  Synthetically generated peptide
  VARIANT (1)..(17): Xaa = Any Amino Acid
CCEXFACXXNPAXCTGA

SEQ ID NO: 11636 - protein, 17 aa, Artificial Sequence
  Synthetically generated peptide
  VARIANT (1)..(17): Xaa = Any Amino Acid
CCEXFACXXNPACXTGA

SEQ ID NO: 11637 - protein, 17 aa, Artificial Sequence
  Synthetically generated peptide
  VARIANT (1)..(17): Xaa = Any Amino Acid
CCEXFACXXNPACTXGA

SEQ ID NO: 11638 - protein, 17 aa, Artificial Sequence
  Synthetically generated peptide
  VARIANT (1)..(17): Xaa = Any Amino Acid
CCEXFACXXNPACTGXA

SEQ ID NO: 11639 - protein, 16 aa, Artificial Sequence
  Synthetically generated peptide
  VARIANT (1)..(16): Xaa = Any Amino Acid
CCEXFACXNXPACTGA

SEQ ID NO: 11640 - protein, 17 aa, Artificial Sequence
  Synthetically generated peptide
  VARIANT (1)..(17): Xaa = Any Amino Acid
CCEXFACXNXXPACTGA

SEQ ID NO: 11641 - protein, 17 aa, Artificial Sequence
  Synthetically generated peptide
  VARIANT (1)..(17): Xaa = Any Amino Acid
CCEXFACXNXPXACTGA

SEQ ID NO: 11642 - protein, 17 aa, Artificial Sequence
  Synthetically generated peptide
  VARIANT (1)..(17): Xaa = Any Amino Acid
CCEXFACXNXPAXCTGA

SEQ ID NO: 11643 - protein, 17 aa, Artificial Sequence
  Synthetically generated peptide
  VARIANT (1)..(17): Xaa = Any Amino Acid
CCEXFACXNXPACXTGA

SEQ ID NO: 11644 - protein, 17 aa, Artificial Sequence
  Synthetically generated peptide
  VARIANT (1)..(17): Xaa = Any Amino Acid
CCEXFACXNXPACTXGA

SEQ ID NO: 11645 - protein, 17 aa, Artificial Sequence
  Synthetically generated peptide
  VARIANT (1)..(17): Xaa = Any Amino Acid
CCEXFACXNXPACTGXA

SEQ ID NO: 11646 - protein, 16 aa, Artificial Sequence
  Synthetically generated peptide
  VARIANT (1)..(16): Xaa = Any Amino Acid
CCEXFACXNPXACTGA

SEQ ID NO: 11647 - protein, 17 aa, Artificial Sequence
  Synthetically generated peptide
  VARIANT (1)..(17): Xaa = Any Amino Acid
CCEXFACXNPXXACTGA

SEQ ID NO: 11648 - protein, 17 aa, Artificial Sequence
  Synthetically generated peptide
  VARIANT (1)..(17): Xaa = Any Amino Acid
CCEXFACXNPXAXCTGA

SEQ ID NO: 11649 - protein, 17 aa, Artificial Sequence
  Synthetically generated peptide
  VARIANT (1)..(17): Xaa = Any Amino Acid
CCEXFACXNPXACXTGA

SEQ ID NO: 11650 - protein, 17 aa, Artificial Sequence
  Synthetically generated peptide
  VARIANT (1)..(17): Xaa = Any Amino Acid
CCEXFACXNPXACTXGA

SEQ ID NO: 11651 - protein, 17 aa, Artificial Sequence
  Synthetically generated peptide
  VARIANT (1)..(17): Xaa = Any Amino Acid
CCEXFACXNPXACTGXA

SEQ ID NO: 11652 - protein, 16 aa, Artificial Sequence
  Synthetically generated peptide
  VARIANT (1)..(16): Xaa = Any Amino Acid
CCEXFACXNPAXCTGA

SEQ ID NO: 11653 - protein, 17 aa, Artificial Sequence
  Synthetically generated peptide
  VARIANT (1)..(17): Xaa = Any Amino Acid
CCEXFACXNPAXXCTGA

SEQ ID NO: 11654 - protein, 17 aa, Artificial Sequence
  Synthetically generated peptide
  VARIANT (1)..(17): Xaa = Any Amino Acid
CCEXFACXNPAXCXTGA

SEQ ID NO: 11655 - protein, 17 aa, Artificial Sequence
  Synthetically generated peptide
  VARIANT (1)..(17): Xaa = Any Amino Acid
CCEXFACXNPAXCTXGA

SEQ ID NO: 11656 - protein, 17 aa, Artificial Sequence
  Synthetically generated peptide
  VARIANT (1)..(17): Xaa = Any Amino Acid
CCEXFACXNPAXCTGXA

SEQ ID NO: 11657 - protein, 16 aa, Artificial Sequence
  Synthetically generated peptide
  VARIANT (1)..(16): Xaa = Any Amino Acid
CCEXFACXNPACXTGA

SEQ ID NO: 11658 - protein, 17 aa, Artificial Sequence
  Synthetically generated peptide
  VARIANT (1)..(17): Xaa = Any Amino Acid
CCEXFACXNPACXXTGA

SEQ ID NO: 11659 - protein, 17 aa, Artificial Sequence
  Synthetically generated peptide
  VARIANT (1)..(17): Xaa = Any Amino Acid
CCEXFACXNPACXTXGA

SEQ ID NO: 11660 - protein, 17 aa, Artificial Sequence
  Synthetically generated peptide
  VARIANT (1)..(17): Xaa = Any Amino Acid
CCEXFACXNPACXTGXA

SEQ ID NO: 11661 - protein, 16 aa, Artificial Sequence
  Synthetically generated peptide
  VARIANT (1)..(16): Xaa = Any Amino Acid
CCEXFACXNPACTXGA

SEQ ID NO: 11662 - protein, 17 aa, Artificial Sequence
  Synthetically generated peptide
  VARIANT (1)..(17): Xaa = Any Amino Acid
CCEXFACXNPACTXXGA

SEQ ID NO: 11663 - protein, 17 aa, Artificial Sequence
  Synthetically generated peptide
  VARIANT (1)..(17): Xaa = Any Amino Acid
CCEXFACXNPACTXGXA

SEQ ID NO: 11664 - protein, 16 aa, Artificial Sequence
  Synthetically generated peptide
  VARIANT (1)..(16): Xaa = Any Amino Acid
CCEXFACXNPACTGXA

SEQ ID NO: 11665 - protein, 17 aa, Artificial Sequence
  Synthetically generated peptide
  VARIANT (1)..(17): Xaa = Any Amino Acid
CCEXFACXNPACTGXXA

SEQ ID NO: 11666 - protein, 15 aa, Artificial Sequence
  Synthetically generated peptide
  VARIANT (1)..(15): Xaa = Any Amino Acid
CCEXFACNXPACTGA

SEQ ID NO: 11667 - protein, 16 aa, Artificial Sequence
  Synthetically generated peptide
  VARIANT (1)..(16): Xaa = Any Amino Acid
CCEXFACNXXPACTGA

SEQ ID NO: 11668 - protein, 17 aa, Artificial Sequence
  Synthetically generated peptide
  VARIANT (1)..(17): Xaa = Any Amino Acid
CCEXFACNXXXPACTGA

SEQ ID NO: 11669 - protein, 17 aa, Artificial Sequence
  Synthetically generated peptide
  VARIANT (1)..(17): Xaa = Any Amino Acid
CCEXFACNXXPXACTGA

SEQ ID NO: 11670 - protein, 17 aa, Artificial Sequence
  Synthetically generated peptide
  VARIANT (1)..(17): Xaa = Any Amino Acid
CCEXFACNXXPAXCTGA

SEQ ID NO: 11671 - protein, 17 aa, Artificial Sequence
  Synthetically generated peptide
  VARIANT (1)..(17): Xaa = Any Amino Acid
CCEXFACNXXPACXTGA

SEQ ID NO: 11672 - protein, 17 aa, Artificial Sequence
  Synthetically generated peptide
  VARIANT (1)..(17): Xaa = Any Amino Acid
CCEXFACNXXPACTXGA

SEQ ID NO: 11673 - protein, 17 aa, Artificial Sequence
  Synthetically generated peptide
  VARIANT (1)..(17): Xaa = Any Amino Acid
CCEXFACNXXPACTGXA

SEQ ID NO: 11674 - protein, 16 aa, Artificial Sequence
  Synthetically generated peptide
  VARIANT (1)..(16): Xaa = Any Amino Acid
CCEXFACNXPXACTGA

SEQ ID NO: 11675 - protein, 17 aa, Artificial Sequence
  Synthetically generated peptide
  VARIANT (1)..(17): Xaa = Any Amino Acid
CCEXFACNXPXXACTGA

SEQ ID NO: 11676 - protein, 17 aa, Artificial Sequence
  Synthetically generated peptide
  VARIANT (1)..(17): Xaa = Any Amino Acid
CCEXFACNXPXAXCTGA

SEQ ID NO: 11677 - protein, 17 aa, Artificial Sequence
  Synthetically generated peptide
  VARIANT (1)..(17): Xaa = Any Amino Acid
CCEXFACNXPXACXTGA

SEQ ID NO: 11678 - protein, 17 aa, Artificial Sequence
  Synthetically generated peptide
  VARIANT (1)..(17): Xaa = Any Amino Acid
CCEXFACNXPXACTXGA

SEQ ID NO: 11679 - protein, 17 aa, Artificial Sequence
  Synthetically generated peptide
  VARIANT (1)..(17): Xaa = Any Amino Acid
CCEXFACNXPXACTGXA

SEQ ID NO: 11680 - protein, 16 aa, Artificial Sequence
  Synthetically generated peptide
  VARIANT (1)..(16): Xaa = Any Amino Acid
CCEXFACNXPAXCTGA

SEQ ID NO: 11681 - protein, 17 aa, Artificial Sequence
  Synthetically generated peptide
  VARIANT (1)..(17): Xaa = Any Amino Acid
CCEXFACNXPAXXCTGA

SEQ ID NO: 11682 - protein, 17 aa, Artificial Sequence
  Synthetically generated peptide
  VARIANT (1)..(17): Xaa = Any Amino Acid
CCEXFACNXPAXCXTGA

SEQ ID NO: 11683 - protein, 17 aa, Artificial Sequence
  Synthetically generated peptide
  VARIANT (1)..(17): Xaa = Any Amino Acid
CCEXFACNXPAXCTXGA

SEQ ID NO: 11684 - protein, 17 aa, Artificial Sequence
  Synthetically generated peptide
  VARIANT (1)..(17): Xaa = Any Amino Acid
CCEXFACNXPAXCTGXA

SEQ ID NO: 11685 - protein, 16 aa, Artificial Sequence
  Synthetically generated peptide
  VARIANT (1)..(16): Xaa = Any Amino Acid
CCEXFACNXPACXTGA

SEQ ID NO: 11686 - protein, 17 aa, Artificial Sequence
  Synthetically generated peptide
  VARIANT (1)..(17): Xaa = Any Amino Acid
CCEXFACNXPACXXTGA

SEQ ID NO: 11687 - protein, 17 aa, Artificial Sequence
  Synthetically generated peptide
  VARIANT (1)..(17): Xaa = Any Amino Acid
CCEXFACNXPACXTXGA

SEQ ID NO: 11688 - protein, 17 aa, Artificial Sequence
  Synthetically generated peptide
  VARIANT (1)..(17): Xaa = Any Amino Acid
CCEXFACNXPACXTGXA

SEQ ID NO: 11689 - protein, 16 aa, Artificial Sequence
  Synthetically generated peptide
  VARIANT (1)..(16): Xaa = Any Amino Acid
CCEXFACNXPACTXGA

SEQ ID NO: 11690 - protein, 17 aa, Artificial Sequence
  Synthetically generated peptide
  VARIANT (1)..(17): Xaa = Any Amino Acid
CCEXFACNXPACTXXGA

SEQ ID NO: 11691 - protein, 17 aa, Artificial Sequence
  Synthetically generated peptide
  VARIANT (1)..(17): Xaa = Any Amino Acid
CCEXFACNXPACTXGXA

SEQ ID NO: 11692 - protein, 16 aa, Artificial Sequence
  Synthetically generated peptide
  VARIANT (1)..(16): Xaa = Any Amino Acid
CCEXFACNXPACTGXA

SEQ ID NO: 11693 - protein, 17 aa, Artificial Sequence
  Synthetically generated peptide
  VARIANT (1)..(17): Xaa = Any Amino Acid
CCEXFACNXPACTGXXA

SEQ ID NO: 11694 - protein, 15 aa, Artificial Sequence
  Synthetically generated peptide
  VARIANT (1)..(15): Xaa = Any Amino Acid
CCEXFACNPXACTGA

SEQ ID NO: 11695 - protein, 16 aa, Artificial Sequence
  Synthetically generated peptide
  VARIANT (1)..(16): Xaa = Any Amino Acid
CCEXFACNPXXACTGA

SEQ ID NO: 11696 - protein, 17 aa, Artificial Sequence
  Synthetically generated peptide
  VARIANT (1)..(17): Xaa = Any Amino Acid
CCEXFACNPXXXACTGA

SEQ ID NO: 11697 - protein, 17 aa, Artificial Sequence
  Synthetically generated peptide
  VARIANT (1)..(17): Xaa = Any Amino Acid
CCEXFACNPXXAXCTGA

SEQ ID NO: 11698 - protein, 17 aa, Artificial Sequence
  Synthetically generated peptide
  VARIANT (1)..(17): Xaa = Any Amino Acid
CCEXFACNPXXACXTGA

SEQ ID NO: 11699 - protein, 17 aa, Artificial Sequence
  Synthetically generated peptide
  VARIANT (1)..(17): Xaa = Any Amino Acid
CCEXFACNPXXACTXGA

SEQ ID NO: 11700 - protein, 17 aa, Artificial Sequence
  Synthetically generated peptide
  VARIANT (1)..(17): Xaa = Any Amino Acid
CCEXFACNPXXACTGXA

SEQ ID NO: 11701 - protein, 16 aa, Artificial Sequence
  Synthetically generated peptide
  VARIANT (1)..(16): Xaa = Any Amino Acid
CCEXFACNPXAXCTGA

SEQ ID NO: 11702 - protein, 17 aa, Artificial Sequence
  Synthetically generated peptide
  VARIANT (1)..(17): Xaa = Any Amino Acid
CCEXFACNPXAXXCTGA

SEQ ID NO: 11703 - protein, 17 aa, Artificial Sequence
  Synthetically generated peptide
  VARIANT (1)..(17): Xaa = Any Amino Acid
CCEXFACNPXAXCXTGA

SEQ ID NO: 11704 - protein, 17 aa, Artificial Sequence
  Synthetically generated peptide
  VARIANT (1)..(17): Xaa = Any Amino Acid
CCEXFACNPXAXCTXGA

SEQ ID NO: 11705 - protein, 17 aa, Artificial Sequence
  Synthetically generated peptide
  VARIANT (1)..(17): Xaa = Any Amino Acid
CCEXFACNPXAXCTGXA

SEQ ID NO: 11706 - protein, 16 aa, Artificial Sequence
  Synthetically generated peptide
  VARIANT (1)..(16): Xaa = Any Amino Acid
CCEXFACNPXACXTGA

SEQ ID NO: 11707 - protein, 17 aa, Artificial Sequence
  Synthetically generated peptide
  VARIANT (1)..(17): Xaa = Any Amino Acid
CCEXFACNPXACXXTGA

SEQ ID NO: 11708 - protein, 17 aa, Artificial Sequence
  Synthetically generated peptide
  VARIANT (1)..(17): Xaa = Any Amino Acid
CCEXFACNPXACXTXGA

SEQ ID NO: 11709 - protein, 17 aa, Artificial Sequence
  Synthetically generated peptide
  VARIANT (1)..(17): Xaa = Any Amino Acid
CCEXFACNPXACXTGXA

SEQ ID NO: 11710 - protein, 16 aa, Artificial Sequence
  Synthetically generated peptide
  VARIANT (1)..(16): Xaa = Any Amino Acid
CCEXFACNPXACTXGA

SEQ ID NO: 11711 - protein, 17 aa, Artificial Sequence
  Synthetically generated peptide
  VARIANT (1)..(17): Xaa = Any Amino Acid
CCEXFACNPXACTXXGA

SEQ ID NO: 11712 - protein, 17 aa, Artificial Sequence
  Synthetically generated peptide
  VARIANT (1)..(17): Xaa = Any Amino Acid
CCEXFACNPXACTXGXA

SEQ ID NO: 11713 - protein, 16 aa, Artificial Sequence
  Synthetically generated peptide
  VARIANT (1)..(16): Xaa = Any Amino Acid
CCEXFACNPXACTGXA

SEQ ID NO: 11714 - protein, 17 aa, Artificial Sequence
  Synthetically generated peptide
  VARIANT (1)..(17): Xaa = Any Amino Acid
CCEXFACNPXACTGXXA

SEQ ID NO: 11715 - protein, 15 aa, Artificial Sequence
  Synthetically generated peptide
  VARIANT (1)..(15): Xaa = Any Amino Acid
CCEXFACNPAXCTGA

SEQ ID NO: 11716 - protein, 16 aa, Artificial Sequence
  Synthetically generated peptide
  VARIANT (1)..(16): Xaa = Any Amino Acid
CCEXFACNPAXXCTGA

SEQ ID NO: 11717 - protein, 17 aa, Artificial Sequence
  Synthetically generated peptide
  VARIANT (1)..(17): Xaa = Any Amino Acid
CCEXFACNPAXXXCTGA

SEQ ID NO: 11718 - protein, 17 aa, Artificial Sequence
  Synthetically generated peptide
  VARIANT (1)..(17): Xaa = Any Amino Acid
CCEXFACNPAXXCXTGA

SEQ ID NO: 11719 - protein, 17 aa, Artificial Sequence
  Synthetically generated peptide
  VARIANT (1)..(17): Xaa = Any Amino Acid
CCEXFACNPAXXCTXGA

SEQ ID NO: 11720 - protein, 17 aa, Artificial Sequence
  Synthetically generated peptide
  VARIANT (1)..(17): Xaa = Any Amino Acid
CCEXFACNPAXXCTGXA

SEQ ID NO: 11721 - protein, 16 aa, Artificial Sequence
  Synthetically generated peptide
  VARIANT (1)..(16): Xaa = Any Amino Acid
CCEXFACNPAXCXTGA

SEQ ID NO: 11722 - protein, 17 aa, Artificial Sequence
  Synthetically generated peptide
  VARIANT (1)..(17): Xaa = Any Amino Acid
CCEXFACNPAXCXXTGA

SEQ ID NO: 11723 - protein, 17 aa, Artificial Sequence
  Synthetically generated peptide
  VARIANT (1)..(17): Xaa = Any Amino Acid
CCEXFACNPAXCXTXGA

SEQ ID NO: 11724 - protein, 17 aa, Artificial Sequence
  Synthetically generated peptide
  VARIANT (1)..(17): Xaa = Any Amino Acid
CCEXFACNPAXCXTGXA

SEQ ID NO: 11725 - protein, 16 aa, Artificial Sequence
  Synthetically generated peptide
  VARIANT (1)..(16): Xaa = Any Amino Acid
CCEXFACNPAXCTXGA

SEQ ID NO: 11726 - protein, 17 aa, Artificial Sequence
  Synthetically generated peptide
  VARIANT (1)..(17): Xaa = Any Amino Acid
CCEXFACNPAXCTXXGA

SEQ ID NO: 11727 - protein, 17 aa, Artificial Sequence
  Synthetically generated peptide
  VARIANT (1)..(17): Xaa = Any Amino Acid
CCEXFACNPAXCTXGXA

SEQ ID NO: 11728 - protein, 16 aa, Artificial Sequence
  Synthetically generated peptide
  VARIANT (1)..(16): Xaa = Any Amino Acid
CCEXFACNPAXCTGXA

SEQ ID NO: 11729 - protein, 17 aa, Artificial Sequence
  Synthetically generated peptide
  VARIANT (1)..(17): Xaa = Any Amino Acid
CCEXFACNPAXCTGXXA

SEQ ID NO: 11730 - protein, 15 aa, Artificial Sequence
  Synthetically generated peptide
  VARIANT (1)..(15): Xaa = Any Amino Acid
CCEXFACNPACXTGA

SEQ ID NO: 11731 - protein, 16 aa, Artificial Sequence
  Synthetically generated peptide
  VARIANT (1)..(16): Xaa = Any Amino Acid
CCEXFACNPACXXTGA

SEQ ID NO: 11732 - protein, 17 aa, Artificial Sequence
  Synthetically generated peptide
  VARIANT (1)..(17): Xaa = Any Amino Acid
CCEXFACNPACXXXTGA

SEQ ID NO: 11733 - protein, 17 aa, Artificial Sequence
  Synthetically generated peptide
  VARIANT (1)..(17): Xaa = Any Amino Acid
CCEXFACNPACXXTXGA

SEQ ID NO: 11734 - protein, 17 aa, Artificial Sequence
  Synthetically generated peptide
  VARIANT (1)..(17): Xaa = Any Amino Acid
CCEXFACNPACXXTGXA

SEQ ID NO: 11735 - protein, 16 aa, Artificial Sequence
  Synthetically generated peptide
  VARIANT (1)..(16): Xaa = Any Amino Acid
CCEXFACNPACXTXGA

SEQ ID NO: 11736 - protein, 17 aa, Artificial Sequence
  Synthetically generated peptide
  VARIANT (1)..(17): Xaa = Any Amino Acid
CCEXFACNPACXTXXGA

SEQ ID NO: 11737 - protein, 17 aa, Artificial Sequence
  Synthetically generated peptide
  VARIANT (1)..(17): Xaa = Any Amino Acid
CCEXFACNPACXTXGXA

SEQ ID NO: 11738 - protein, 16 aa, Artificial Sequence
  Synthetically generated peptide
  VARIANT (1)..(16): Xaa = Any Amino Acid
CCEXFACNPACXTGXA

SEQ ID NO: 11739 - protein, 17 aa, Artificial Sequence
  Synthetically generated peptide
  VARIANT (1)..(17): Xaa = Any Amino Acid
CCEXFACNPACXTGXXA

SEQ ID NO: 11740 - protein, 15 aa, Artificial Sequence
  Synthetically generated peptide
  VARIANT (1)..(15): Xaa = Any Amino Acid
CCEXFACNPACTXGA

SEQ ID NO: 11741 - protein, 16 aa, Artificial Sequence
  Synthetically generated peptide
  VARIANT (1)..(16): Xaa = Any Amino Acid
CCEXFACNPACTXXGA

SEQ ID NO: 11742 - protein, 17 aa, Artificial Sequence
  Synthetically generated peptide
  VARIANT (1)..(17): Xaa = Any Amino Acid
CCEXFACNPACTXXXGA

SEQ ID NO: 11743 - protein, 17 aa, Artificial Sequence
  Synthetically generated peptide
  VARIANT (1)..(17): Xaa = Any Amino Acid
CCEXFACNPACTXXGXA

SEQ ID NO: 11744 - protein, 16 aa, Artificial Sequence
  Synthetically generated peptide
  VARIANT (1)..(16): Xaa = Any Amino Acid
CCEXFACNPACTXGXA

SEQ ID NO: 11745 - protein, 17 aa, Artificial Sequence
  Synthetically generated peptide
  VARIANT (1)..(17): Xaa = Any Amino Acid
CCEXFACNPACTXGXXA

SEQ ID NO: 11746 - protein, 15 aa, Artificial Sequence
  Synthetically generated peptide
  VARIANT (1)..(15): Xaa = Any Amino Acid
CCEXFACNPACTGXA

SEQ ID NO: 11747 - protein, 16 aa, Artificial Sequence
  Synthetically generated peptide
  VARIANT (1)..(16): Xaa = Any Amino Acid
CCEXFACNPACTGXXA

SEQ ID NO: 11748 - protein, 17 aa, Artificial Sequence
  Synthetically generated peptide
  VARIANT (1)..(17): Xaa = Any Amino Acid
CCEXFACNPACTGXXXA

SEQ ID NO: 11749 - protein, 14 aa, Artificial Sequence
  Synthetically generated peptide
  VARIANT (1)..(14): Xaa = Any Amino Acid
CCEFXACNPACTGA

SEQ ID NO: 11750 - protein, 15 aa, Artificial Sequence
  Synthetically generated peptide
  VARIANT (1)..(15): Xaa = Any Amino Acid
CCEFXXACNPACTGA

SEQ ID NO: 11751 - protein, 16 aa, Artificial Sequence
  Synthetically generated peptide
  VARIANT (1)..(16): Xaa = Any Amino Acid
CCEFXXXACNPACTGA

SEQ ID NO: 11752 - protein, 17 aa, Artificial Sequence
  Synthetically generated peptide
  VARIANT (1)..(17): Xaa = Any Amino Acid
CCEFXXXXACNPACTGA

SEQ ID NO: 11753 - protein, 17 aa, Artificial Sequence
  Synthetically generated peptide
  VARIANT (1)..(17): Xaa = Any Amino Acid
CCEFXXXACXNPACTGA

SEQ ID NO: 11754 - protein, 17 aa, Artificial Sequence
  Synthetically generated peptide
  VARIANT (1)..(17): Xaa = Any Amino Acid
CCEFXXXACNXPACTGA

SEQ ID NO: 11755 - protein, 17 aa, Artificial Sequence
  Synthetically generated peptide
  VARIANT (1)..(17): Xaa = Any Amino Acid
CCEFXXXACNPXACTGA

SEQ ID NO: 11756 - protein, 17 aa, Artificial Sequence
  Synthetically generated peptide
  VARIANT (1)..(17): Xaa = Any Amino Acid
CCEFXXXACNPAXCTGA

SEQ ID NO: 11757 - protein, 17 aa, Artificial Sequence
  Synthetically generated peptide
  VARIANT (1)..(17): Xaa = Any Amino Acid
CCEFXXXACNPACXTGA

SEQ ID NO: 11758 - protein, 17 aa, Artificial Sequence
  Synthetically generated peptide
  VARIANT (1)..(17): Xaa = Any Amino Acid
CCEFXXXACNPACTXGA

SEQ ID NO: 11759 - protein, 17 aa, Artificial Sequence
  Synthetically generated peptide
  VARIANT (1)..(17): Xaa = Any Amino Acid
CCEFXXXACNPACTGXA

SEQ ID NO: 11760 - protein, 16 aa, Artificial Sequence
  Synthetically generated peptide
  VARIANT (1)..(16): Xaa = Any Amino Acid
CCEFXXACXNPACTGA

SEQ ID NO: 11761 - protein, 17 aa, Artificial Sequence
  Synthetically generated peptide
  VARIANT (1)..(17): Xaa = Any Amino Acid
CCEFXXACXXNPACTGA

SEQ ID NO: 11762 - protein, 17 aa, Artificial Sequence
  Synthetically generated peptide
  VARIANT (1)..(17): Xaa = Any Amino Acid
CCEFXXACXNXPACTGA

SEQ ID NO: 11763 - protein, 17 aa, Artificial Sequence
  Synthetically generated peptide
  VARIANT (1)..(17): Xaa = Any Amino Acid
CCEFXXACXNPXACTGA

SEQ ID NO: 11764 - protein, 17 aa, Artificial Sequence
  Synthetically generated peptide
  VARIANT (1)..(17): Xaa = Any Amino Acid
CCEFXXACXNPAXCTGA

SEQ ID NO: 11765 - protein, 17 aa, Artificial Sequence
  Synthetically generated peptide
  VARIANT (1)..(17): Xaa = Any Amino Acid
CCEFXXACXNPACXTGA

SEQ ID NO: 11766 - protein, 17 aa, Artificial Sequence
  Synthetically generated peptide
  VARIANT (1)..(17): Xaa = Any Amino Acid
CCEFXXACXNPACTXGA

SEQ ID NO: 11767 - protein, 17 aa, Artificial Sequence
  Synthetically generated peptide
  VARIANT (1)..(17): Xaa = Any Amino Acid
CCEFXXACXNPACTGXA

SEQ ID NO: 11768 - protein, 16 aa, Artificial Sequence
  Synthetically generated peptide
  VARIANT (1)..(16): Xaa = Any Amino Acid
CCEFXXACNXPACTGA

SEQ ID NO: 11769 - protein, 17 aa, Artificial Sequence
  Synthetically generated peptide
  VARIANT (1)..(17): Xaa = Any Amino Acid
CCEFXXACNXXPACTGA

SEQ ID NO: 11770 - protein, 17 aa, Artificial Sequence
  Synthetically generated peptide
  VARIANT (1)..(17): Xaa = Any Amino Acid
CCEFXXACNXPXACTGA

SEQ ID NO: 11771 - protein, 17 aa, Artificial Sequence
  Synthetically generated peptide
  VARIANT (1)..(17): Xaa = Any Amino Acid
CCEFXXACNXPAXCTGA

SEQ ID NO: 11772 - protein, 17 aa, Artificial Sequence
  Synthetically generated peptide
  VARIANT (1)..(17): Xaa = Any Amino Acid
CCEFXXACNXPACXTGA

SEQ ID NO: 11773 - protein, 17 aa, Artificial Sequence
  Synthetically generated peptide
  VARIANT (1)..(17): Xaa = Any Amino Acid
CCEFXXACNXPACTXGA

SEQ ID NO: 11774 - protein, 17 aa, Artificial Sequence
  Synthetically generated peptide
  VARIANT (1)..(17): Xaa = Any Amino Acid
CCEFXXACNXPACTGXA

SEQ ID NO: 11775 - protein, 16 aa, Artificial Sequence
  Synthetically generated peptide
  VARIANT (1)..(16): Xaa = Any Amino Acid
CCEFXXACNPXACTGA

SEQ ID NO: 11776 - protein, 17 aa, Artificial Sequence
  Synthetically generated peptide
  VARIANT (1)..(17): Xaa = Any Amino Acid
CCEFXXACNPXXACTGA

SEQ ID NO: 11777 - protein, 17 aa, Artificial Sequence
  Synthetically generated peptide
  VARIANT (1)..(17): Xaa = Any Amino Acid
CCEFXXACNPXAXCTGA

SEQ ID NO: 11778 - protein, 17 aa, Artificial Sequence
  Synthetically generated peptide
  VARIANT (1)..(17): Xaa = Any Amino Acid
CCEFXXACNPXACXTGA

SEQ ID NO: 11779 - protein, 17 aa, Artificial Sequence
  Synthetically generated peptide
  VARIANT (1)..(17): Xaa = Any Amino Acid
CCEFXXACNPXACTXGA

SEQ ID NO: 11780 - protein, 17 aa, Artificial Sequence
  Synthetically generated peptide
  VARIANT (1)..(17): Xaa = Any Amino Acid
CCEFXXACNPXACTGXA

SEQ ID NO: 11781 - protein, 16 aa, Artificial Sequence
  Synthetically generated peptide
  VARIANT (1)..(16): Xaa = Any Amino Acid
CCEFXXACNPAXCTGA

SEQ ID NO: 11782 - protein, 17 aa, Artificial Sequence
  Synthetically generated peptide
  VARIANT (1)..(17): Xaa = Any Amino Acid
CCEFXXACNPAXXCTGA

SEQ ID NO: 11783 - protein, 17 aa, Artificial Sequence
  Synthetically generated peptide
  VARIANT (1)..(17): Xaa = Any Amino Acid
CCEFXXACNPAXCXTGA

SEQ ID NO: 11784 - protein, 17 aa, Artificial Sequence
  Synthetically generated peptide
  VARIANT (1)..(17): Xaa = Any Amino Acid
CCEFXXACNPAXCTXGA

SEQ ID NO: 11785 - protein, 17 aa, Artificial Sequence
  Synthetically generated peptide
  VARIANT (1)..(17): Xaa = Any Amino Acid
CCEFXXACNPAXCTGXA

SEQ ID NO: 11786 - protein, 16 aa, Artificial Sequence
  Synthetically generated peptide
  VARIANT (1)..(16): Xaa = Any Amino Acid
CCEFXXACNPACXTGA

SEQ ID NO: 11787 - protein, 17 aa, Artificial Sequence
  Synthetically generated peptide
  VARIANT (1)..(17): Xaa = Any Amino Acid
CCEFXXACNPACXXTGA

SEQ ID NO: 11788 - protein, 17 aa, Artificial Sequence
  Synthetically generated peptide
  VARIANT (1)..(17): Xaa = Any Amino Acid
CCEFXXACNPACXTXGA

SEQ ID NO: 11789 - protein, 17 aa, Artificial Sequence
  Synthetically generated peptide
  VARIANT (1)..(17): Xaa = Any Amino Acid
CCEFXXACNPACXTGXA

SEQ ID NO: 11790 - protein, 16 aa, Artificial Sequence
  Synthetically generated peptide
  VARIANT (1)..(16): Xaa = Any Amino Acid
CCEFXXACNPACTXGA

SEQ ID NO: 11791 - protein, 17 aa, Artificial Sequence
  Synthetically generated peptide
  VARIANT (1)..(17): Xaa = Any Amino Acid
CCEFXXACNPACTXXGA

SEQ ID NO: 11792 - protein, 17 aa, Artificial Sequence
  Synthetically generated peptide
  VARIANT (1)..(17): Xaa = Any Amino Acid
CCEFXXACNPACTXGXA

SEQ ID NO: 11793 - protein, 16 aa, Artificial Sequence
  Synthetically generated peptide
  VARIANT (1)..(16): Xaa = Any Amino Acid
CCEFXXACNPACTGXA

SEQ ID NO: 11794 - protein, 17 aa, Artificial Sequence
  Synthetically generated peptide
  VARIANT (1)..(17): Xaa = Any Amino Acid
CCEFXXACNPACTGXXA

SEQ ID NO: 11795 - protein, 15 aa, Artificial Sequence
  Synthetically generated peptide
  VARIANT (1)..(15): Xaa = Any Amino Acid
CCEFXACXNPACTGA

SEQ ID NO: 11796 - protein, 16 aa, Artificial Sequence
  Synthetically generated peptide
  VARIANT (1)..(16): Xaa = Any Amino Acid
CCEFXACXXNPACTGA

SEQ ID NO: 11797 - protein, 17 aa, Artificial Sequence
  Synthetically generated peptide
  VARIANT (1)..(17): Xaa = Any Amino Acid
CCEFXACXXXNPACTGA

SEQ ID NO: 11798 - protein, 17 aa, Artificial Sequence
  Synthetically generated peptide
  VARIANT (1)..(17): Xaa = Any Amino Acid
CCEFXACXXNXPACTGA

SEQ ID NO: 11799 - protein, 17 aa, Artificial Sequence
  Synthetically generated peptide
  VARIANT (1)..(17): Xaa = Any Amino Acid
CCEFXACXXNPXACTGA

SEQ ID NO: 11800 - protein, 17 aa, Artificial Sequence
  Synthetically generated peptide
  VARIANT (1)..(17): Xaa = Any Amino Acid
CCEFXACXXNPAXCTGA

SEQ ID NO: 11801 - protein, 17 aa, Artificial Sequence
  Synthetically generated peptide
  VARIANT (1)..(17): Xaa = Any Amino Acid
CCEFXACXXNPACXTGA

SEQ ID NO: 11802 - protein, 17 aa, Artificial Sequence
  Synthetically generated peptide
  VARIANT (1)..(17): Xaa = Any Amino Acid
CCEFXACXXNPACTXGA

SEQ ID NO: 11803 - protein, 17 aa, Artificial Sequence
  Synthetically generated peptide
  VARIANT (1)..(17): Xaa = Any Amino Acid
CCEFXACXXNPACTGXA

SEQ ID NO: 11804 - protein, 16 aa, Artificial Sequence
  Synthetically generated peptide
  VARIANT (1)..(16): Xaa = Any Amino Acid
CCEFXACXNXPACTGA

SEQ ID NO: 11805 - protein, 17 aa, Artificial Sequence
  Synthetically generated peptide
  VARIANT (1)..(17): Xaa = Any Amino Acid
CCEFXACXNXXPACTGA

SEQ ID NO: 11806 - protein, 17 aa, Artificial Sequence
  Synthetically generated peptide
  VARIANT (1)..(17): Xaa = Any Amino Acid
CCEFXACXNXPXACTGA

SEQ ID NO: 11807 - protein, 17 aa, Artificial Sequence
  Synthetically generated peptide
  VARIANT (1)..(17): Xaa = Any Amino Acid
CCEFXACXNXPAXCTGA

SEQ ID NO: 11808 - protein, 17 aa, Artificial Sequence
  Synthetically generated peptide
  VARIANT (1)..(17): Xaa = Any Amino Acid
CCEFXACXNXPACXTGA

SEQ ID NO: 11809 - protein, 17 aa, Artificial Sequence
  Synthetically generated peptide
  VARIANT (1)..(17): Xaa = Any Amino Acid
CCEFXACXNXPACTXGA

SEQ ID NO: 11810 - protein, 17 aa, Artificial Sequence
  Synthetically generated peptide
  VARIANT (1)..(17): Xaa = Any Amino Acid
CCEFXACXNXPACTGXA

SEQ ID NO: 11811 - protein, 16 aa, Artificial Sequence
  Synthetically generated peptide
  VARIANT (1)..(16): Xaa = Any Amino Acid
CCEFXACXNPXACTGA

SEQ ID NO: 11812 - protein, 17 aa, Artificial Sequence
  Synthetically generated peptide
  VARIANT (1)..(17): Xaa = Any Amino Acid
CCEFXACXNPXXACTGA

SEQ ID NO: 11813 - protein, 17 aa, Artificial Sequence
  Synthetically generated peptide
  VARIANT (1)..(17): Xaa = Any Amino Acid
CCEFXACXNPXAXCTGA

SEQ ID NO: 11814 - protein, 17 aa, Artificial Sequence
  Synthetically generated peptide
  VARIANT (1)..(17): Xaa = Any Amino Acid
CCEFXACXNPXACXTGA

SEQ ID NO: 11815 - protein, 17 aa, Artificial Sequence
  Synthetically generated peptide
  VARIANT (1)..(17): Xaa = Any Amino Acid
CCEFXACXNPXACTXGA

SEQ ID NO: 11816 - protein, 17 aa, Artificial Sequence
  Synthetically generated peptide
  VARIANT (1)..(17): Xaa = Any Amino Acid
CCEFXACXNPXACTGXA

SEQ ID NO: 11817 - protein, 16 aa, Artificial Sequence
  Synthetically generated peptide
  VARIANT (1)..(16): Xaa = Any Amino Acid
CCEFXACXNPAXCTGA

SEQ ID NO: 11818 - protein, 17 aa, Artificial Sequence
  Synthetically generated peptide
  VARIANT (1)..(17): Xaa = Any Amino Acid
CCEFXACXNPAXXCTGA

SEQ ID NO: 11819 - protein, 17 aa, Artificial Sequence
  Synthetically generated peptide
  VARIANT (1)..(17): Xaa = Any Amino Acid
CCEFXACXNPAXCXTGA

SEQ ID NO: 11820 - protein, 17 aa, Artificial Sequence
  Synthetically generated peptide
  VARIANT (1)..(17): Xaa = Any Amino Acid
CCEFXACXNPAXCTXGA

SEQ ID NO: 11821 - protein, 17 aa, Artificial Sequence
  Synthetically generated peptide
  VARIANT (1)..(17): Xaa = Any Amino Acid
CCEFXACXNPAXCTGXA

SEQ ID NO: 11822 - protein, 16 aa, Artificial Sequence
  Synthetically generated peptide
  VARIANT (1)..(16): Xaa = Any Amino Acid
CCEFXACXNPACXTGA

SEQ ID NO: 11823 - protein, 17 aa, Artificial Sequence
  Synthetically generated peptide
  VARIANT (1)..(17): Xaa = Any Amino Acid
CCEFXACXNPACXXTGA

SEQ ID NO: 11824 - protein, 17 aa, Artificial Sequence
  Synthetically generated peptide
  VARIANT (1)..(17): Xaa = Any Amino Acid
CCEFXACXNPACXTXGA

SEQ ID NO: 11825 - protein, 17 aa, Artificial Sequence
  Synthetically generated peptide
  VARIANT (1)..(17): Xaa = Any Amino Acid
CCEFXACXNPACXTGXA

SEQ ID NO: 11826 - protein, 16 aa, Artificial Sequence
  Synthetically generated peptide
  VARIANT (1)..(16): Xaa = Any Amino Acid
CCEFXACXNPACTXGA

SEQ ID NO: 11827 - protein, 17 aa, Artificial Sequence
  Synthetically generated peptide
  VARIANT (1)..(17): Xaa = Any Amino Acid
CCEFXACXNPACTXXGA

SEQ ID NO: 11828 - protein, 17 aa, Artificial Sequence
  Synthetically generated peptide
  VARIANT (1)..(17): Xaa = Any Amino Acid
CCEFXACXNPACTXGXA

SEQ ID NO: 11829 - protein, 16 aa, Artificial Sequence
  Synthetically generated peptide
  VARIANT (1)..(16): Xaa = Any Amino Acid
CCEFXACXNPACTGXA

SEQ ID NO: 11830 - protein, 17 aa, Artificial Sequence
  Synthetically generated peptide
  VARIANT (1)..(17): Xaa = Any Amino Acid
CCEFXACXNPACTGXXA

SEQ ID NO: 11831 - protein, 15 aa, Artificial Sequence
  Synthetically generated peptide
  VARIANT (1)..(15): Xaa = Any Amino Acid
CCEFXACNXPACTGA

SEQ ID NO: 11832 - protein, 16 aa, Artificial Sequence
  Synthetically generated peptide
  VARIANT (1)..(16): Xaa = Any Amino Acid
CCEFXACNXXPACTGA

SEQ ID NO: 11833 - protein, 17 aa, Artificial Sequence
  Synthetically generated peptide
  VARIANT (1)..(17): Xaa = Any Amino Acid
CCEFXACNXXXPACTGA

SEQ ID NO: 11834 - protein, 17 aa, Artificial Sequence
  Synthetically generated peptide
  VARIANT (1)..(17): Xaa = Any Amino Acid
CCEFXACNXXPXACTGA

SEQ ID NO: 11835 - protein, 17 aa, Artificial Sequence
  Synthetically generated peptide
  VARIANT (1)..(17): Xaa = Any Amino Acid
CCEFXACNXXPAXCTGA

SEQ ID NO: 11836 - protein, 17 aa, Artificial Sequence
  Synthetically generated peptide
  VARIANT (1)..(17): Xaa = Any Amino Acid
CCEFXACNXXPACXTGA

SEQ ID NO: 11837 - protein, 17 aa, Artificial Sequence
  Synthetically generated peptide
  VARIANT (1)..(17): Xaa = Any Amino Acid
CCEFXACNXXPACTXGA

SEQ ID NO: 11838 - protein, 17 aa, Artificial Sequence
  Synthetically generated peptide
  VARIANT (1)..(17): Xaa = Any Amino Acid
CCEFXACNXXPACTGXA

SEQ ID NO: 11839 - protein, 16 aa, Artificial Sequence
  Synthetically generated peptide
  VARIANT (1)..(16): Xaa = Any Amino Acid
CCEFXACNXPXACTGA

SEQ ID NO: 11840 - protein, 17 aa, Artificial Sequence
  Synthetically generated peptide
  VARIANT (1)..(17): Xaa = Any Amino Acid
CCEFXACNXPXXACTGA

SEQ ID NO: 11841 - protein, 17 aa, Artificial Sequence
  Synthetically generated peptide
  VARIANT (1)..(17): Xaa = Any Amino Acid
CCEFXACNXPXAXCTGA

SEQ ID NO: 11842 - protein, 17 aa, Artificial Sequence
  Synthetically generated peptide
  VARIANT (1)..(17): Xaa = Any Amino Acid
CCEFXACNXPXACXTGA

SEQ ID NO: 11843 - protein, 17 aa, Artificial Sequence
  Synthetically generated peptide
  VARIANT (1)..(17): Xaa = Any Amino Acid
CCEFXACNXPXACTXGA

SEQ ID NO: 11844 - protein, 17 aa, Artificial Sequence
  Synthetically generated peptide
  VARIANT (1)..(17): Xaa = Any Amino Acid
CCEFXACNXPXACTGXA

SEQ ID NO: 11845 - protein, 16 aa, Artificial Sequence
  Synthetically generated peptide
  VARIANT (1)..(16): Xaa = Any Amino Acid
CCEFXACNXPAXCTGA

SEQ ID NO: 11846 - protein, 17 aa, Artificial Sequence
  Synthetically generated peptide
  VARIANT (1)..(17): Xaa = Any Amino Acid
CCEFXACNXPAXXCTGA

SEQ ID NO: 11847 - protein, 17 aa, Artificial Sequence
  Synthetically generated peptide
  VARIANT (1)..(17): Xaa = Any Amino Acid
CCEFXACNXPAXCXTGA

SEQ ID NO: 11848 - protein, 17 aa, Artificial Sequence
  Synthetically generated peptide
  VARIANT (1)..(17): Xaa = Any Amino Acid
CCEFXACNXPAXCTXGA

SEQ ID NO: 11849 - protein, 17 aa, Artificial Sequence
  Synthetically generated peptide
  VARIANT (1)..(17): Xaa = Any Amino Acid
CCEFXACNXPAXCTGXA

SEQ ID NO: 11850 - protein, 16 aa, Artificial Sequence
  Synthetically generated peptide
  VARIANT (1)..(16): Xaa = Any Amino Acid
CCEFXACNXPACXTGA

SEQ ID NO: 11851 - protein, 17 aa, Artificial Sequence
  Synthetically generated peptide
  VARIANT (1)..(17): Xaa = Any Amino Acid
CCEFXACNXPACXXTGA

SEQ ID NO: 11852 - protein, 17 aa, Artificial Sequence
  Synthetically generated peptide
  VARIANT (1)..(17): Xaa = Any Amino Acid
CCEFXACNXPACXTXGA

SEQ ID NO: 11853 - protein, 17 aa, Artificial Sequence
  Synthetically generated peptide
  VARIANT (1)..(17): Xaa = Any Amino Acid
CCEFXACNXPACXTGXA

SEQ ID NO: 11854 - protein, 16 aa, Artificial Sequence
  Synthetically generated peptide
  VARIANT (1)..(16): Xaa = Any Amino Acid
CCEFXACNXPACTXGA

SEQ ID NO: 11855 - protein, 17 aa, Artificial Sequence
  Synthetically generated peptide
  VARIANT (1)..(17): Xaa = Any Amino Acid
CCEFXACNXPACTXXGA

SEQ ID NO: 11856 - protein, 17 aa, Artificial Sequence
  Synthetically generated peptide
  VARIANT (1)..(17): Xaa = Any Amino Acid
CCEFXACNXPACTXGXA

SEQ ID NO: 11857 - protein, 16 aa, Artificial Sequence
  Synthetically generated peptide
  VARIANT (1)..(16): Xaa = Any Amino Acid
CCEFXACNXPACTGXA

SEQ ID NO: 11858 - protein, 17 aa, Artificial Sequence
  Synthetically generated peptide
  VARIANT (1)..(17): Xaa = Any Amino Acid
CCEFXACNXPACTGXXA

SEQ ID NO: 11859 - protein, 15 aa, Artificial Sequence
  Synthetically generated peptide
  VARIANT (1)..(15): Xaa = Any Amino Acid
CCEFXACNPXACTGA

SEQ ID NO: 11860 - protein, 16 aa, Artificial Sequence
  Synthetically generated peptide
  VARIANT (1)..(16): Xaa = Any Amino Acid
CCEFXACNPXXACTGA

SEQ ID NO: 11861 - protein, 17 aa, Artificial Sequence
  Synthetically generated peptide
  VARIANT (1)..(17): Xaa = Any Amino Acid
CCEFXACNPXXXACTGA

SEQ ID NO: 11862 - protein, 17 aa, Artificial Sequence
  Synthetically generated peptide
  VARIANT (1)..(17): Xaa = Any Amino Acid
CCEFXACNPXXAXCTGA

SEQ ID NO: 11863 - protein, 17 aa, Artificial Sequence
  Synthetically generated peptide
  VARIANT (1)..(17): Xaa = Any Amino Acid
CCEFXACNPXXACXTGA

SEQ ID NO: 11864 - protein, 17 aa, Artificial Sequence
  Synthetically generated peptide
  VARIANT (1)..(17): Xaa = Any Amino Acid
CCEFXACNPXXACTXGA

SEQ ID NO: 11865 - protein, 17 aa, Artificial Sequence
  Synthetically generated peptide
  VARIANT (1)..(17): Xaa = Any Amino Acid
CCEFXACNPXXACTGXA

SEQ ID NO: 11866 - protein, 16 aa, Artificial Sequence
  Synthetically generated peptide
  VARIANT (1)..(16): Xaa = Any Amino Acid
CCEFXACNPXAXCTGA

SEQ ID NO: 11867 - protein, 17 aa, Artificial Sequence
  Synthetically generated peptide
  VARIANT (1)..(17): Xaa = Any Amino Acid
CCEFXACNPXAXXCTGA

SEQ ID NO: 11868 - protein, 17 aa, Artificial Sequence
  Synthetically generated peptide
  VARIANT (1)..(17): Xaa = Any Amino Acid
CCEFXACNPXAXCXTGA

SEQ ID NO: 11869 - protein, 17 aa, Artificial Sequence
  Synthetically generated peptide
  VARIANT (1)..(17): Xaa = Any Amino Acid
CCEFXACNPXAXCTXGA

SEQ ID NO: 11870 - protein, 17 aa, Artificial Sequence
  Synthetically generated peptide
  VARIANT (1)..(17): Xaa = Any Amino Acid
CCEFXACNPXAXCTGXA

SEQ ID NO: 11871 - protein, 16 aa, Artificial Sequence
  Synthetically generated peptide
  VARIANT (1)..(16): Xaa = Any Amino Acid
CCEFXACNPXACXTGA

SEQ ID NO: 11872 - protein, 17 aa, Artificial Sequence
  Synthetically generated peptide
  VARIANT (1)..(17): Xaa = Any Amino Acid
CCEFXACNPXACXXTGA

SEQ ID NO: 11873 - protein, 17 aa, Artificial Sequence
  Synthetically generated peptide
  VARIANT (1)..(17): Xaa = Any Amino Acid
CCEFXACNPXACXTXGA

SEQ ID NO: 11874 - protein, 17 aa, Artificial Sequence
  Synthetically generated peptide
  VARIANT (1)..(17): Xaa = Any Amino Acid
CCEFXACNPXACXTGXA

SEQ ID NO: 11875 - protein, 16 aa, Artificial Sequence
  Synthetically generated peptide
  VARIANT (1)..(16): Xaa = Any Amino Acid
CCEFXACNPXACTXGA

SEQ ID NO: 11876 - protein, 17 aa, Artificial Sequence
  Synthetically generated peptide
  VARIANT (1)..(17): Xaa = Any Amino Acid
CCEFXACNPXACTXXGA

SEQ ID NO: 11877 - protein, 17 aa, Artificial Sequence
  Synthetically generated peptide
  VARIANT (1)..(17): Xaa = Any Amino Acid
CCEFXACNPXACTXGXA

SEQ ID NO: 11878 - protein, 16 aa, Artificial Sequence
  Synthetically generated peptide
  VARIANT (1)..(16): Xaa = Any Amino Acid
CCEFXACNPXACTGXA

SEQ ID NO: 11879 - protein, 17 aa, Artificial Sequence
  Synthetically generated peptide
  VARIANT (1)..(17): Xaa = Any Amino Acid
CCEFXACNPXACTGXXA

SEQ ID NO: 11880 - protein, 15 aa, Artificial Sequence
  Synthetically generated peptide
  VARIANT (1)..(15): Xaa = Any Amino Acid
CCEFXACNPAXCTGA

SEQ ID NO: 11881 - protein, 16 aa, Artificial Sequence
  Synthetically generated peptide
  VARIANT (1)..(16): Xaa = Any Amino Acid
CCEFXACNPAXXCTGA

SEQ ID NO: 11882 - protein, 17 aa, Artificial Sequence
  Synthetically generated peptide
  VARIANT (1)..(17): Xaa = Any Amino Acid
CCEFXACNPAXXXCTGA

SEQ ID NO: 11883 - protein, 17 aa, Artificial Sequence
  Synthetically generated peptide
  VARIANT (1)..(17): Xaa = Any Amino Acid
CCEFXACNPAXXCXTGA

SEQ ID NO: 11884 - protein, 17 aa, Artificial Sequence
  Synthetically generated peptide
  VARIANT (1)..(17): Xaa = Any Amino Acid
CCEFXACNPAXXCTXGA

SEQ ID NO: 11885 - protein, 17 aa, Artificial Sequence
  Synthetically generated peptide
  VARIANT (1)..(17): Xaa = Any Amino Acid
CCEFXACNPAXXCTGXA

SEQ ID NO: 11886 - protein, 16 aa, Artificial Sequence
  Synthetically generated peptide
  VARIANT (1)..(16): Xaa = Any Amino Acid
CCEFXACNPAXCXTGA

SEQ ID NO: 11887 - protein, 17 aa, Artificial Sequence
  Synthetically generated peptide
  VARIANT (1)..(17): Xaa = Any Amino Acid
CCEFXACNPAXCXXTGA

SEQ ID NO: 11888 - protein, 17 aa, Artificial Sequence
  Synthetically generated peptide
  VARIANT (1)..(17): Xaa = Any Amino Acid
CCEFXACNPAXCXTXGA

SEQ ID NO: 11889 - protein, 17 aa, Artificial Sequence
  Synthetically generated peptide
  VARIANT (1)..(17): Xaa = Any Amino Acid
CCEFXACNPAXCXTGXA

SEQ ID NO: 11890 - protein, 16 aa, Artificial Sequence
  Synthetically generated peptide
  VARIANT (1)..(16): Xaa = Any Amino Acid
CCEFXACNPAXCTXGA

SEQ ID NO: 11891 - protein, 17 aa, Artificial Sequence
  Synthetically generated peptide
  VARIANT (1)..(17): Xaa = Any Amino Acid
CCEFXACNPAXCTXXGA

SEQ ID NO: 11892 - protein, 17 aa, Artificial Sequence
  Synthetically generated peptide
  VARIANT (1)..(17): Xaa = Any Amino Acid
CCEFXACNPAXCTXGXA

SEQ ID NO: 11893 - protein, 16 aa, Artificial Sequence
  Synthetically generated peptide
  VARIANT (1)..(16): Xaa = Any Amino Acid
CCEFXACNPAXCTGXA

SEQ ID NO: 11894 - protein, 17 aa, Artificial Sequence
  Synthetically generated peptide
  VARIANT (1)..(17): Xaa = Any Amino Acid
CCEFXACNPAXCTGXXA

SEQ ID NO: 11895 - protein, 15 aa, Artificial Sequence
  Synthetically generated peptide
  VARIANT (1)..(15): Xaa = Any Amino Acid
CCEFXACNPACXTGA

SEQ ID NO: 11896 - protein, 16 aa, Artificial Sequence
  Synthetically generated peptide
  VARIANT (1)..(16): Xaa = Any Amino Acid
CCEFXACNPACXXTGA

SEQ ID NO: 11897 - protein, 17 aa, Artificial Sequence
  Synthetically generated peptide
  VARIANT (1)..(17): Xaa = Any Amino Acid
CCEFXACNPACXXXTGA

SEQ ID NO: 11898 - protein, 17 aa, Artificial Sequence
  Synthetically generated peptide
  VARIANT (1)..(17): Xaa = Any Amino Acid
CCEFXACNPACXXTXGA

SEQ ID NO: 11899 - protein, 17 aa, Artificial Sequence
  Synthetically generated peptide
  VARIANT (1)..(17): Xaa = Any Amino Acid
CCEFXACNPACXXTGXA

SEQ ID NO: 11900 - protein, 16 aa, Artificial Sequence
  Synthetically generated peptide
  VARIANT (1)..(16): Xaa = Any Amino Acid
CCEFXACNPACXTXGA

SEQ ID NO: 11901 - protein, 17 aa, Artificial Sequence
  Synthetically generated peptide
  VARIANT (1)..(17): Xaa = Any Amino Acid
CCEFXACNPACXTXXGA

SEQ ID NO: 11902 - protein, 17 aa, Artificial Sequence
  Synthetically generated peptide
  VARIANT (1)..(17): Xaa = Any Amino Acid
CCEFXACNPACXTXGXA

SEQ ID NO: 11903 - protein, 16 aa, Artificial Sequence
  Synthetically generated peptide
  VARIANT (1)..(16): Xaa = Any Amino Acid
CCEFXACNPACXTGXA

SEQ ID NO: 11904 - protein, 17 aa, Artificial Sequence
  Synthetically generated peptide
  VARIANT (1)..(17): Xaa = Any Amino Acid
CCEFXACNPACXTGXXA

SEQ ID NO: 11905 - protein, 15 aa, Artificial Sequence
  Synthetically generated peptide
  VARIANT (1)..(15): Xaa = Any Amino Acid
CCEFXACNPACTXGA

SEQ ID NO: 11906 - protein, 16 aa, Artificial Sequence
  Synthetically generated peptide
  VARIANT (1)..(16): Xaa = Any Amino Acid
CCEFXACNPACTXXGA

SEQ ID NO: 11907 - protein, 17 aa, Artificial Sequence
  Synthetically generated peptide
  VARIANT (1)..(17): Xaa = Any Amino Acid
CCEFXACNPACTXXXGA

SEQ ID NO: 11908 - protein, 17 aa, Artificial Sequence
  Synthetically generated peptide
  VARIANT (1)..(17): Xaa = Any Amino Acid
CCEFXACNPACTXXGXA

SEQ ID NO: 11909 - protein, 16 aa, Artificial Sequence
  Synthetically generated peptide
  VARIANT (1)..(16): Xaa = Any Amino Acid
CCEFXACNPACTXGXA

SEQ ID NO: 11910 - protein, 17 aa, Artificial Sequence
  Synthetically generated peptide
  VARIANT (1)..(17): Xaa = Any Amino Acid
CCEFXACNPACTXGXXA

SEQ ID NO: 11911 - protein, 15 aa, Artificial Sequence
  Synthetically generated peptide
  VARIANT (1)..(15): Xaa = Any Amino Acid
CCEFXACNPACTGXA

SEQ ID NO: 11912 - protein, 16 aa, Artificial Sequence
  Synthetically generated peptide
  VARIANT (1)..(16): Xaa = Any Amino Acid
CCEFXACNPACTGXXA

SEQ ID NO: 11913 - protein, 17 aa, Artificial Sequence
  Synthetically generated peptide
  VARIANT (1)..(17): Xaa = Any Amino Acid
CCEFXACNPACTGXXXA

SEQ ID NO: 11914 - protein, 14 aa, Artificial Sequence
  Synthetically generated peptide
  VARIANT (1)..(14): Xaa = Any Amino Acid
CCEFACXNPACTGA

SEQ ID NO: 11915 - protein, 15 aa, Artificial Sequence
  Synthetically generated peptide
  VARIANT (1)..(15): Xaa = Any Amino Acid
CCEFACXXNPACTGA

SEQ ID NO: 11916 - protein, 16 aa, Artificial Sequence
  Synthetically generated peptide
  VARIANT (1)..(16): Xaa = Any Amino Acid
CCEFACXXXNPACTGA

SEQ ID NO: 11917 - protein, 17 aa, Artificial Sequence
  Synthetically generated peptide
  VARIANT (1)..(17): Xaa = Any Amino Acid
CCEFACXXXXNPACTGA

SEQ ID NO: 11918 - protein, 17 aa, Artificial Sequence
  Synthetically generated peptide
  VARIANT (1)..(17): Xaa = Any Amino Acid
CCEFACXXXNXPACTGA

SEQ ID NO: 11919 - protein, 17 aa, Artificial Sequence
  Synthetically generated peptide
  VARIANT (1)..(17): Xaa = Any Amino Acid
CCEFACXXXNPXACTGA

SEQ ID NO: 11920 - protein, 17 aa, Artificial Sequence
  Synthetically generated peptide
  VARIANT (1)..(17): Xaa = Any Amino Acid
CCEFACXXXNPAXCTGA

SEQ ID NO: 11921 - protein, 17 aa, Artificial Sequence
  Synthetically generated peptide
  VARIANT (1)..(17): Xaa = Any Amino Acid
CCEFACXXXNPACXTGA

SEQ ID NO: 11922 - protein, 17 aa, Artificial Sequence
  Synthetically generated peptide
  VARIANT (1)..(17): Xaa = Any Amino Acid
CCEFACXXXNPACTXGA

SEQ ID NO: 11923 - protein, 17 aa, Artificial Sequence
  Synthetically generated peptide
  VARIANT (1)..(17): Xaa = Any Amino Acid
CCEFACXXXNPACTGXA

SEQ ID NO: 11924 - protein, 16 aa, Artificial Sequence
  Synthetically generated peptide
  VARIANT (1)..(16): Xaa = Any Amino Acid
CCEFACXXNXPACTGA

SEQ ID NO: 11925 - protein, 17 aa, Artificial Sequence
  Synthetically generated peptide
  VARIANT (1)..(17): Xaa = Any Amino Acid
CCEFACXXNXXPACTGA

SEQ ID NO: 11926 - protein, 17 aa, Artificial Sequence
  Synthetically generated peptide
  VARIANT (1)..(17): Xaa = Any Amino Acid
CCEFACXXNXPXACTGA

SEQ ID NO: 11927 - protein, 17 aa, Artificial Sequence
  Synthetically generated peptide
  VARIANT (1)..(17): Xaa = Any Amino Acid
CCEFACXXNXPAXCTGA

SEQ ID NO: 11928 - protein, 17 aa, Artificial Sequence
  Synthetically generated peptide
  VARIANT (1)..(17): Xaa = Any Amino Acid
CCEFACXXNXPACXTGA

SEQ ID NO: 11929 - protein, 17 aa, Artificial Sequence
  Synthetically generated peptide
  VARIANT (1)..(17): Xaa = Any Amino Acid
CCEFACXXNXPACTXGA

SEQ ID NO: 11930 - protein, 17 aa, Artificial Sequence
  Synthetically generated peptide
  VARIANT (1)..(17): Xaa = Any Amino Acid
CCEFACXXNXPACTGXA

SEQ ID NO: 11931 - protein, 16 aa, Artificial Sequence
  Synthetically generated peptide
  VARIANT (1)..(16): Xaa = Any Amino Acid
CCEFACXXNPXACTGA

SEQ ID NO: 11932 - protein, 17 aa, Artificial Sequence
  Synthetically generated peptide
  VARIANT (1)..(17): Xaa = Any Amino Acid
CCEFACXXNPXXACTGA

SEQ ID NO: 11933 - protein, 17 aa, Artificial Sequence
  Synthetically generated peptide
  VARIANT (1)..(17): Xaa = Any Amino Acid
CCEFACXXNPXAXCTGA

SEQ ID NO: 11934 - protein, 17 aa, Artificial Sequence
  Synthetically generated peptide
  VARIANT (1)..(17): Xaa = Any Amino Acid
CCEFACXXNPXACXTGA

SEQ ID NO: 11935 - protein, 17 aa, Artificial Sequence
  Synthetically generated peptide
  VARIANT (1)..(17): Xaa = Any Amino Acid
CCEFACXXNPXACTXGA

SEQ ID NO: 11936 - protein, 17 aa, Artificial Sequence
  Synthetically generated peptide
  VARIANT (1)..(17): Xaa = Any Amino Acid
CCEFACXXNPXACTGXA

SEQ ID NO: 11937 - protein, 16 aa, Artificial Sequence
  Synthetically generated peptide
  VARIANT (1)..(16): Xaa = Any Amino Acid
CCEFACXXNPAXCTGA

SEQ ID NO: 11938 - protein, 17 aa, Artificial Sequence
  Synthetically generated peptide
  VARIANT (1)..(17): Xaa = Any Amino Acid
CCEFACXXNPAXXCTGA

SEQ ID NO: 11939 - protein, 17 aa, Artificial Sequence
  Synthetically generated peptide
  VARIANT (1)..(17): Xaa = Any Amino Acid
CCEFACXXNPAXCXTGA

SEQ ID NO: 11940 - protein, 17 aa, Artificial Sequence
  Synthetically generated peptide
  VARIANT (1)..(17): Xaa = Any Amino Acid
CCEFACXXNPAXCTXGA

SEQ ID NO: 11941 - protein, 17 aa, Artificial Sequence
  Synthetically generated peptide
  VARIANT (1)..(17): Xaa = Any Amino Acid
CCEFACXXNPAXCTGXA

SEQ ID NO: 11942 - protein, 16 aa, Artificial Sequence
  Synthetically generated peptide
  VARIANT (1)..(16): Xaa = Any Amino Acid
CCEFACXXNPACXTGA

SEQ ID NO: 11943 - protein, 17 aa, Artificial Sequence
  Synthetically generated peptide
  VARIANT (1)..(17): Xaa = Any Amino Acid
CCEFACXXNPACXXTGA

SEQ ID NO: 11944 - protein, 17 aa, Artificial Sequence
  Synthetically generated peptide
  VARIANT (1)..(17): Xaa = Any Amino Acid
CCEFACXXNPACXTXGA

SEQ ID NO: 11945 - protein, 17 aa, Artificial Sequence
  Synthetically generated peptide
  VARIANT (1)..(17): Xaa = Any Amino Acid
CCEFACXXNPACXTGXA

SEQ ID NO: 11946 - protein, 16 aa, Artificial Sequence
  Synthetically generated peptide
  VARIANT (1)..(16): Xaa = Any Amino Acid
CCEFACXXNPACTXGA

SEQ ID NO: 11947 - protein, 17 aa, Artificial Sequence
  Synthetically generated peptide
  VARIANT (1)..(17): Xaa = Any Amino Acid
CCEFACXXNPACTXXGA

SEQ ID NO: 11948 - protein, 17 aa, Artificial Sequence
  Synthetically generated peptide
  VARIANT (1)..(17): Xaa = Any Amino Acid
CCEFACXXNPACTXGXA

SEQ ID NO: 11949 - protein, 16 aa, Artificial Sequence
  Synthetically generated peptide
  VARIANT (1)..(16): Xaa = Any Amino Acid
CCEFACXXNPACTGXA

SEQ ID NO: 11950 - protein, 17 aa, Artificial Sequence
  Synthetically generated peptide
  VARIANT (1)..(17): Xaa = Any Amino Acid
CCEFACXXNPACTGXXA

SEQ ID NO: 11951 - protein, 15 aa, Artificial Sequence
  Synthetically generated peptide
  VARIANT (1)..(15): Xaa = Any Amino Acid
CCEFACXNXPACTGA

SEQ ID NO: 11952 - protein, 16 aa, Artificial Sequence
  Synthetically generated peptide
  VARIANT (1)..(16): Xaa = Any Amino Acid
CCEFACXNXXPACTGA

SEQ ID NO: 11953 - protein, 17 aa, Artificial Sequence
  Synthetically generated peptide
  VARIANT (1)..(17): Xaa = Any Amino Acid
CCEFACXNXXXPACTGA

SEQ ID NO: 11954 - protein, 17 aa, Artificial Sequence
  Synthetically generated peptide
  VARIANT (1)..(17): Xaa = Any Amino Acid
CCEFACXNXXPXACTGA

SEQ ID NO: 11955 - protein, 17 aa, Artificial Sequence
  Synthetically generated peptide
  VARIANT (1)..(17): Xaa = Any Amino Acid
CCEFACXNXXPAXCTGA

SEQ ID NO: 11956 - protein, 17 aa, Artificial Sequence
  Synthetically generated peptide
  VARIANT (1)..(17): Xaa = Any Amino Acid
CCEFACXNXXPACXTGA

SEQ ID NO: 11957 - protein, 17 aa, Artificial Sequence
  Synthetically generated peptide
  VARIANT (1)..(17): Xaa = Any Amino Acid
CCEFACXNXXPACTXGA

SEQ ID NO: 11958 - protein, 17 aa, Artificial Sequence
  Synthetically generated peptide
  VARIANT (1)..(17): Xaa = Any Amino Acid
CCEFACXNXXPACTGXA

SEQ ID NO: 11959 - protein, 16 aa, Artificial Sequence
  Synthetically generated peptide
  VARIANT (1)..(16): Xaa = Any Amino Acid
CCEFACXNXPXACTGA

SEQ ID NO: 11960 - protein, 17 aa, Artificial Sequence
  Synthetically generated peptide
  VARIANT (1)..(17): Xaa = Any Amino Acid
CCEFACXNXPXXACTGA

SEQ ID NO: 11961 - protein, 17 aa, Artificial Sequence
  Synthetically generated peptide
  VARIANT (1)..(17): Xaa = Any Amino Acid
CCEFACXNXPXAXCTGA

SEQ ID NO: 11962 - protein, 17 aa, Artificial Sequence
  Synthetically generated peptide
  VARIANT (1)..(17): Xaa = Any Amino Acid
CCEFACXNXPXACXTGA

SEQ ID NO: 11963 - protein, 17 aa, Artificial Sequence
  Synthetically generated peptide
  VARIANT (1)..(17): Xaa = Any Amino Acid
CCEFACXNXPXACTXGA

SEQ ID NO: 11964 - protein, 17 aa, Artificial Sequence
  Synthetically generated peptide
  VARIANT (1)..(17): Xaa = Any Amino Acid
CCEFACXNXPXACTGXA

SEQ ID NO: 11965 - protein, 16 aa, Artificial Sequence
  Synthetically generated peptide
  VARIANT (1)..(16): Xaa = Any Amino Acid
CCEFACXNXPAXCTGA

SEQ ID NO: 11966 - protein, 17 aa, Artificial Sequence
  Synthetically generated peptide
  VARIANT (1)..(17): Xaa = Any Amino Acid
CCEFACXNXPAXXCTGA

SEQ ID NO: 11967 - protein, 17 aa, Artificial Sequence
  Synthetically generated peptide
  VARIANT (1)..(17): Xaa = Any Amino Acid
CCEFACXNXPAXCXTGA

SEQ ID NO: 11968 - protein, 17 aa, Artificial Sequence
  Synthetically generated peptide
  VARIANT (1)..(17): Xaa = Any Amino Acid
CCEFACXNXPAXCTXGA

SEQ ID NO: 11969 - protein, 17 aa, Artificial Sequence
  Synthetically generated peptide
  VARIANT (1)..(17): Xaa = Any Amino Acid
CCEFACXNXPAXCTGXA

SEQ ID NO: 11970 - protein, 16 aa, Artificial Sequence
  Synthetically generated peptide
  VARIANT (1)..(16): Xaa = Any Amino Acid
CCEFACXNXPACXTGA

SEQ ID NO: 11971 - protein, 17 aa, Artificial Sequence
  Synthetically generated peptide
  VARIANT (1)..(17): Xaa = Any Amino Acid
CCEFACXNXPACXXTGA

SEQ ID NO: 11972 - protein, 17 aa, Artificial Sequence
  Synthetically generated peptide
  VARIANT (1)..(17): Xaa = Any Amino Acid
CCEFACXNXPACXTXGA

SEQ ID NO: 11973 - protein, 17 aa, Artificial Sequence
  Synthetically generated peptide
  VARIANT (1)..(17): Xaa = Any Amino Acid
CCEFACXNXPACXTGXA

SEQ ID NO: 11974 - protein, 16 aa, Artificial Sequence
  Synthetically generated peptide
  VARIANT (1)..(16): Xaa = Any Amino Acid
CCEFACXNXPACTXGA

SEQ ID NO: 11975 - protein, 17 aa, Artificial Sequence
  Synthetically generated peptide
  VARIANT (1)..(17): Xaa = Any Amino Acid
CCEFACXNXPACTXXGA

SEQ ID NO: 11976 - protein, 17 aa, Artificial Sequence
  Synthetically generated peptide
  VARIANT (1)..(17): Xaa = Any Amino Acid
CCEFACXNXPACTXGXA

SEQ ID NO: 11977 - protein, 16 aa, Artificial Sequence
  Synthetically generated peptide
  VARIANT (1)..(16): Xaa = Any Amino Acid
CCEFACXNXPACTGXA

SEQ ID NO: 11978 - protein, 17 aa, Artificial Sequence
  Synthetically generated peptide
  VARIANT (1)..(17): Xaa = Any Amino Acid
CCEFACXNXPACTGXXA

SEQ ID NO: 11979 - protein, 15 aa, Artificial Sequence
  Synthetically generated peptide
  VARIANT (1)..(15): Xaa = Any Amino Acid
CCEFACXNPXACTGA

SEQ ID NO: 11980 - protein, 16 aa, Artificial Sequence
  Synthetically generated peptide
  VARIANT (1)..(16): Xaa = Any Amino Acid
CCEFACXNPXXACTGA

SEQ ID NO: 11981 - protein, 17 aa, Artificial Sequence
  Synthetically generated peptide
  VARIANT (1)..(17): Xaa = Any Amino Acid
CCEFACXNPXXXACTGA

SEQ ID NO: 11982 - protein, 17 aa, Artificial Sequence
  Synthetically generated peptide
  VARIANT (1)..(17): Xaa = Any Amino Acid
CCEFACXNPXXAXCTGA

SEQ ID NO: 11983 - protein, 17 aa, Artificial Sequence
  Synthetically generated peptide
  VARIANT (1)..(17): Xaa = Any Amino Acid
CCEFACXNPXXACXTGA

SEQ ID NO: 11984 - protein, 17 aa, Artificial Sequence
  Synthetically generated peptide
  VARIANT (1)..(17): Xaa = Any Amino Acid
CCEFACXNPXXACTXGA

SEQ ID NO: 11985 - protein, 17 aa, Artificial Sequence
  Synthetically generated peptide
  VARIANT (1)..(17): Xaa = Any Amino Acid
CCEFACXNPXXACTGXA

SEQ ID NO: 11986 - protein, 16 aa, Artificial Sequence
  Synthetically generated peptide
  VARIANT (1)..(16): Xaa = Any Amino Acid
CCEFACXNPXAXCTGA

SEQ ID NO: 11987 - protein, 17 aa, Artificial Sequence
  Synthetically generated peptide
  VARIANT (1)..(17): Xaa = Any Amino Acid
CCEFACXNPXAXXCTGA

SEQ ID NO: 11988 - protein, 17 aa, Artificial Sequence
  Synthetically generated peptide
  VARIANT (1)..(17): Xaa = Any Amino Acid
CCEFACXNPXAXCXTGA

SEQ ID NO: 11989 - protein, 17 aa, Artificial Sequence
  Synthetically generated peptide
  VARIANT (1)..(17): Xaa = Any Amino Acid
CCEFACXNPXAXCTXGA

SEQ ID NO: 11990 - protein, 17 aa, Artificial Sequence
  Synthetically generated peptide
  VARIANT (1)..(17): Xaa = Any Amino Acid
CCEFACXNPXAXCTGXA

SEQ ID NO: 11991 - protein, 16 aa, Artificial Sequence
  Synthetically generated peptide
  VARIANT (1)..(16): Xaa = Any Amino Acid
CCEFACXNPXACXTGA

SEQ ID NO: 11992 - protein, 17 aa, Artificial Sequence
  Synthetically generated peptide
  VARIANT (1)..(17): Xaa = Any Amino Acid
CCEFACXNPXACXXTGA

SEQ ID NO: 11993 - protein, 17 aa, Artificial Sequence
  Synthetically generated peptide
  VARIANT (1)..(17): Xaa = Any Amino Acid
CCEFACXNPXACXTXGA

SEQ ID NO: 11994 - protein, 17 aa, Artificial Sequence
  Synthetically generated peptide
  VARIANT (1)..(17): Xaa = Any Amino Acid
CCEFACXNPXACXTGXA

SEQ ID NO: 11995 - protein, 16 aa, Artificial Sequence
  Synthetically generated peptide
  VARIANT (1)..(16): Xaa = Any Amino Acid
CCEFACXNPXACTXGA

SEQ ID NO: 11996 - protein, 17 aa, Artificial Sequence
  Synthetically generated peptide
  VARIANT (1)..(17): Xaa = Any Amino Acid
CCEFACXNPXACTXXGA

SEQ ID NO: 11997 - protein, 17 aa, Artificial Sequence
  Synthetically generated peptide
  VARIANT (1)..(17): Xaa = Any Amino Acid
CCEFACXNPXACTXGXA

SEQ ID NO: 11998 - protein, 16 aa, Artificial Sequence
  Synthetically generated peptide
  VARIANT (1)..(16): Xaa = Any Amino Acid
CCEFACXNPXACTGXA

SEQ ID NO: 11999 - protein, 17 aa, Artificial Sequence
  Synthetically generated peptide
  VARIANT (1)..(17): Xaa = Any Amino Acid
CCEFACXNPXACTGXXA

SEQ ID NO: 12000 - protein, 15 aa, Artificial Sequence
  Synthetically generated peptide
  VARIANT (1)..(15): Xaa = Any Amino Acid
CCEFACXNPAXCTGA

SEQ ID NO: 12001 - protein, 16 aa, Artificial Sequence
  Synthetically generated peptide
  VARIANT (1)..(16): Xaa = Any Amino Acid
CCEFACXNPAXXCTGA

SEQ ID NO: 12002 - protein, 17 aa, Artificial Sequence
  Synthetically generated peptide
  VARIANT (1)..(17): Xaa = Any Amino Acid
CCEFACXNPAXXXCTGA

SEQ ID NO: 12003 - protein, 17 aa, Artificial Sequence
  Synthetically generated peptide
  VARIANT (1)..(17): Xaa = Any Amino Acid
CCEFACXNPAXXCXTGA

SEQ ID NO: 12004 - protein, 17 aa, Artificial Sequence
  Synthetically generated peptide
  VARIANT (1)..(17): Xaa = Any Amino Acid
CCEFACXNPAXXCTXGA

SEQ ID NO: 12005 - protein, 17 aa, Artificial Sequence
  Synthetically generated peptide
  VARIANT (1)..(17): Xaa = Any Amino Acid
CCEFACXNPAXXCTGXA

SEQ ID NO: 12006 - protein, 16 aa, Artificial Sequence
  Synthetically generated peptide
  VARIANT (1)..(16): Xaa = Any Amino Acid
CCEFACXNPAXCXTGA

SEQ ID NO: 12007 - protein, 17 aa, Artificial Sequence
  Synthetically generated peptide
  VARIANT (1)..(17): Xaa = Any Amino Acid
CCEFACXNPAXCXXTGA

SEQ ID NO: 12008 - protein, 17 aa, Artificial Sequence
  Synthetically generated peptide
  VARIANT (1)..(17): Xaa = Any Amino Acid
CCEFACXNPAXCXTXGA

SEQ ID NO: 12009 - protein, 17 aa, Artificial Sequence
  Synthetically generated peptide
  VARIANT (1)..(17): Xaa = Any Amino Acid
CCEFACXNPAXCXTGXA

SEQ ID NO: 12010 - protein, 16 aa, Artificial Sequence
  Synthetically generated peptide
  VARIANT (1)..(16): Xaa = Any Amino Acid
CCEFACXNPAXCTXGA

SEQ ID NO: 12011 - protein, 17 aa, Artificial Sequence
  Synthetically generated peptide
  VARIANT (1)..(17): Xaa = Any Amino Acid
CCEFACXNPAXCTXXGA

SEQ ID NO: 12012 - protein, 17 aa, Artificial Sequence
  Synthetically generated peptide
  VARIANT (1)..(17): Xaa = Any Amino Acid
CCEFACXNPAXCTXGXA

SEQ ID NO: 12013 - protein, 16 aa, Artificial Sequence
  Synthetically generated peptide
  VARIANT (1)..(16): Xaa = Any Amino Acid
CCEFACXNPAXCTGXA

SEQ ID NO: 12014 - protein, 17 aa, Artificial Sequence
  Synthetically generated peptide
  VARIANT (1)..(17): Xaa = Any Amino Acid
CCEFACXNPAXCTGXXA

SEQ ID NO: 12015 - protein, 15 aa, Artificial Sequence
  Synthetically generated peptide
  VARIANT (1)..(15): Xaa = Any Amino Acid
CCEFACXNPACXTGA

SEQ ID NO: 12016 - protein, 16 aa, Artificial Sequence
  Synthetically generated peptide
  VARIANT (1)..(16): Xaa = Any Amino Acid
CCEFACXNPACXXTGA

SEQ ID NO: 12017 - protein, 17 aa, Artificial Sequence
  Synthetically generated peptide
  VARIANT (1)..(17): Xaa = Any Amino Acid
CCEFACXNPACXXXTGA

SEQ ID NO: 12018 - protein, 17 aa, Artificial Sequence
  Synthetically generated peptide
  VARIANT (1)..(17): Xaa = Any Amino Acid
CCEFACXNPACXXTXGA

SEQ ID NO: 12019 - protein, 17 aa, Artificial Sequence
  Synthetically generated peptide
  VARIANT (1)..(17): Xaa = Any Amino Acid
CCEFACXNPACXXTGXA

SEQ ID NO: 12020 - protein, 16 aa, Artificial Sequence
  Synthetically generated peptide
  VARIANT (1)..(16): Xaa = Any Amino Acid
CCEFACXNPACXTXGA

SEQ ID NO: 12021 - protein, 17 aa, Artificial Sequence
  Synthetically generated peptide
  VARIANT (1)..(17): Xaa = Any Amino Acid
CCEFACXNPACXTXXGA

SEQ ID NO: 12022 - protein, 17 aa, Artificial Sequence
  Synthetically generated peptide
  VARIANT (1)..(17): Xaa = Any Amino Acid
CCEFACXNPACXTXGXA

SEQ ID NO: 12023 - protein, 16 aa, Artificial Sequence
  Synthetically generated peptide
  VARIANT (1)..(16): Xaa = Any Amino Acid
CCEFACXNPACXTGXA

SEQ ID NO: 12024 - protein, 17 aa, Artificial Sequence
  Synthetically generated peptide
  VARIANT (1)..(17): Xaa = Any Amino Acid
CCEFACXNPACXTGXXA

SEQ ID NO: 12025 - protein, 15 aa, Artificial Sequence
  Synthetically generated peptide
  VARIANT (1)..(15): Xaa = Any Amino Acid
CCEFACXNPACTXGA

SEQ ID NO: 12026 - protein, 16 aa, Artificial Sequence
  Synthetically generated peptide
  VARIANT (1)..(16): Xaa = Any Amino Acid
CCEFACXNPACTXXGA

SEQ ID NO: 12027 - protein, 17 aa, Artificial Sequence
  Synthetically generated peptide
  VARIANT (1)..(17): Xaa = Any Amino Acid
CCEFACXNPACTXXXGA

SEQ ID NO: 12028 - protein, 17 aa, Artificial Sequence
  Synthetically generated peptide
  VARIANT (1)..(17): Xaa = Any Amino Acid
CCEFACXNPACTXXGXA

SEQ ID NO: 12029 - protein, 16 aa, Artificial Sequence
  Synthetically generated peptide
  VARIANT (1)..(16): Xaa = Any Amino Acid
CCEFACXNPACTXGXA

SEQ ID NO: 12030 - protein, 17 aa, Artificial Sequence
  Synthetically generated peptide
  VARIANT (1)..(17): Xaa = Any Amino Acid
CCEFACXNPACTXGXXA

SEQ ID NO: 12031 - protein, 15 aa, Artificial Sequence
  Synthetically generated peptide
  VARIANT (1)..(15): Xaa = Any Amino Acid
CCEFACXNPACTGXA

SEQ ID NO: 12032 - protein, 16 aa, Artificial Sequence
  Synthetically generated peptide
  VARIANT (1)..(16): Xaa = Any Amino Acid
CCEFACXNPACTGXXA

SEQ ID NO: 12033 - protein, 17 aa, Artificial Sequence
  Synthetically generated peptide
  VARIANT (1)..(17): Xaa = Any Amino Acid
CCEFACXNPACTGXXXA

SEQ ID NO: 12034 - protein, 14 aa, Artificial Sequence
  Synthetically generated peptide
  VARIANT (1)..(14): Xaa = Any Amino Acid
CCEFACNXPACTGA

SEQ ID NO: 12035 - protein, 15 aa, Artificial Sequence
  Synthetically generated peptide
  VARIANT (1)..(15): Xaa = Any Amino Acid
CCEFACNXXPACTGA

SEQ ID NO: 12036 - protein, 16 aa, Artificial Sequence
  Synthetically generated peptide
  VARIANT (1)..(16): Xaa = Any Amino Acid
CCEFACNXXXPACTGA

SEQ ID NO: 12037 - protein, 17 aa, Artificial Sequence
  Synthetically generated peptide
  VARIANT (1)..(17): Xaa = Any Amino Acid
CCEFACNXXXXPACTGA

SEQ ID NO: 12038 - protein, 17 aa, Artificial Sequence
  Synthetically generated peptide
  VARIANT (1)..(17): Xaa = Any Amino Acid
CCEFACNXXXPXACTGA

SEQ ID NO: 12039 - protein, 17 aa, Artificial Sequence
  Synthetically generated peptide
  VARIANT (1)..(17): Xaa = Any Amino Acid
CCEFACNXXXPAXCTGA

SEQ ID NO: 12040 - protein, 17 aa, Artificial Sequence
  Synthetically generated peptide
  VARIANT (1)..(17): Xaa = Any Amino Acid
CCEFACNXXXPACXTGA

SEQ ID NO: 12041 - protein, 17 aa, Artificial Sequence
  Synthetically generated peptide
  VARIANT (1)..(17): Xaa = Any Amino Acid
CCEFACNXXXPACTXGA

SEQ ID NO: 12042 - protein, 17 aa, Artificial Sequence
  Synthetically generated peptide
  VARIANT (1)..(17): Xaa = Any Amino Acid
CCEFACNXXXPACTGXA

SEQ ID NO: 12043 - protein, 16 aa, Artificial Sequence
  Synthetically generated peptide
  VARIANT (1)..(16): Xaa = Any Amino Acid
CCEFACNXXPXACTGA

SEQ ID NO: 12044 - protein, 17 aa, Artificial Sequence
  Synthetically generated peptide
  VARIANT (1)..(17): Xaa = Any Amino Acid
CCEFACNXXPXXACTGA

SEQ ID NO: 12045 - protein, 17 aa, Artificial Sequence
  Synthetically generated peptide
  VARIANT (1)..(17): Xaa = Any Amino Acid
CCEFACNXXPXAXCTGA

SEQ ID NO: 12046 - protein, 17 aa, Artificial Sequence
  Synthetically generated peptide
  VARIANT (1)..(17): Xaa = Any Amino Acid
CCEFACNXXPXACXTGA

SEQ ID NO: 12047 - protein, 17 aa, Artificial Sequence
  Synthetically generated peptide
  VARIANT (1)..(17): Xaa = Any Amino Acid
CCEFACNXXPXACTXGA

SEQ ID NO: 12048 - protein, 17 aa, Artificial Sequence
  Synthetically generated peptide
  VARIANT (1)..(17): Xaa = Any Amino Acid
CCEFACNXXPXACTGXA

SEQ ID NO: 12049 - protein, 16 aa, Artificial Sequence
  Synthetically generated peptide
  VARIANT (1)..(16): Xaa = Any Amino Acid
CCEFACNXXPAXCTGA

SEQ ID NO: 12050 - protein, 17 aa, Artificial Sequence
  Synthetically generated peptide
  VARIANT (1)..(17): Xaa = Any Amino Acid
CCEFACNXXPAXXCTGA

SEQ ID NO: 12051 - protein, 17 aa, Artificial Sequence
  Synthetically generated peptide
  VARIANT (1)..(17): Xaa = Any Amino Acid
CCEFACNXXPAXCXTGA

SEQ ID NO: 12052 - protein, 17 aa, Artificial Sequence
  Synthetically generated peptide
  VARIANT (1)..(17): Xaa = Any Amino Acid
CCEFACNXXPAXCTXGA

SEQ ID NO: 12053 - protein, 17 aa, Artificial Sequence
  Synthetically generated peptide
  VARIANT (1)..(17): Xaa = Any Amino Acid
CCEFACNXXPAXCTGXA

SEQ ID NO: 12054 - protein, 16 aa, Artificial Sequence
  Synthetically generated peptide
  VARIANT (1)..(16): Xaa = Any Amino Acid
CCEFACNXXPACXTGA

SEQ ID NO: 12055 - protein, 17 aa, Artificial Sequence
  Synthetically generated peptide
  VARIANT (1)..(17): Xaa = Any Amino Acid
CCEFACNXXPACXXTGA

SEQ ID NO: 12056 - protein, 17 aa, Artificial Sequence
  Synthetically generated peptide
  VARIANT (1)..(17): Xaa = Any Amino Acid
CCEFACNXXPACXTXGA

SEQ ID NO: 12057 - protein, 17 aa, Artificial Sequence
  Synthetically generated peptide
  VARIANT (1)..(17): Xaa = Any Amino Acid
CCEFACNXXPACXTGXA

SEQ ID NO: 12058 - protein, 16 aa, Artificial Sequence
  Synthetically generated peptide
  VARIANT (1)..(16): Xaa = Any Amino Acid
CCEFACNXXPACTXGA

SEQ ID NO: 12059 - protein, 17 aa, Artificial Sequence
  Synthetically generated peptide
  VARIANT (1)..(17): Xaa = Any Amino Acid
CCEFACNXXPACTXXGA

SEQ ID NO: 12060 - protein, 17 aa, Artificial Sequence
  Synthetically generated peptide
  VARIANT (1)..(17): Xaa = Any Amino Acid
CCEFACNXXPACTXGXA

SEQ ID NO: 12061 - protein, 16 aa, Artificial Sequence
  Synthetically generated peptide
  VARIANT (1)..(16): Xaa = Any Amino Acid
CCEFACNXXPACTGXA

SEQ ID NO: 12062 - protein, 17 aa, Artificial Sequence
  Synthetically generated peptide
  VARIANT (1)..(17): Xaa = Any Amino Acid
CCEFACNXXPACTGXXA

SEQ ID NO: 12063 - protein, 15 aa, Artificial Sequence
  Synthetically generated peptide
  VARIANT (1)..(15): Xaa = Any Amino Acid
CCEFACNXPXACTGA

SEQ ID NO: 12064 - protein, 16 aa, Artificial Sequence
  Synthetically generated peptide
  VARIANT (1)..(16): Xaa = Any Amino Acid
CCEFACNXPXXACTGA

SEQ ID NO: 12065 - protein, 17 aa, Artificial Sequence
  Synthetically generated peptide
  VARIANT (1)..(17): Xaa = Any Amino Acid
CCEFACNXPXXXACTGA

SEQ ID NO: 12066 - protein, 17 aa, Artificial Sequence
  Synthetically generated peptide
  VARIANT (1)..(17): Xaa = Any Amino Acid
CCEFACNXPXXAXCTGA

SEQ ID NO: 12067 - protein, 17 aa, Artificial Sequence
  Synthetically generated peptide
  VARIANT (1)..(17): Xaa = Any Amino Acid
CCEFACNXPXXACXTGA

SEQ ID NO: 12068 - protein, 17 aa, Artificial Sequence
  Synthetically generated peptide
  VARIANT (1)..(17): Xaa = Any Amino Acid
CCEFACNXPXXACTXGA

SEQ ID NO: 12069 - protein, 17 aa, Artificial Sequence
  Synthetically generated peptide
  VARIANT (1)..(17): Xaa = Any Amino Acid
CCEFACNXPXXACTGXA

SEQ ID NO: 12070 - protein, 16 aa, Artificial Sequence
  Synthetically generated peptide
  VARIANT (1)..(16): Xaa = Any Amino Acid
CCEFACNXPXAXCTGA

SEQ ID NO: 12071 - protein, 17 aa, Artificial Sequence
  Synthetically generated peptide
  VARIANT (1)..(17): Xaa = Any Amino Acid
CCEFACNXPXAXXCTGA

SEQ ID NO: 12072 - protein, 17 aa, Artificial Sequence
  Synthetically generated peptide
  VARIANT (1)..(17): Xaa = Any Amino Acid
CCEFACNXPXAXCXTGA

SEQ ID NO: 12073 - protein, 17 aa, Artificial Sequence
  Synthetically generated peptide
  VARIANT (1)..(17): Xaa = Any Amino Acid
CCEFACNXPXAXCTXGA

SEQ ID NO: 12074 - protein, 17 aa, Artificial Sequence
  Synthetically generated peptide
  VARIANT (1)..(17): Xaa = Any Amino Acid
CCEFACNXPXAXCTGXA

SEQ ID NO: 12075 - protein, 16 aa, Artificial Sequence
  Synthetically generated peptide
  VARIANT (1)..(16): Xaa = Any Amino Acid
CCEFACNXPXACXTGA

SEQ ID NO: 12076 - protein, 17 aa, Artificial Sequence
  Synthetically generated peptide
  VARIANT (1)..(17): Xaa = Any Amino Acid
CCEFACNXPXACXXTGA

SEQ ID NO: 12077 - protein, 17 aa, Artificial Sequence
  Synthetically generated peptide
  VARIANT (1)..(17): Xaa = Any Amino Acid
CCEFACNXPXACXTXGA

SEQ ID NO: 12078 - protein, 17 aa, Artificial Sequence
  Synthetically generated peptide
  VARIANT (1)..(17): Xaa = Any Amino Acid
CCEFACNXPXACXTGXA

SEQ ID NO: 12079 - protein, 16 aa, Artificial Sequence
  Synthetically generated peptide
  VARIANT (1)..(16): Xaa = Any Amino Acid
CCEFACNXPXACTXGA

SEQ ID NO: 12080 - protein, 17 aa, Artificial Sequence
  Synthetically generated peptide
  VARIANT (1)..(17): Xaa = Any Amino Acid
CCEFACNXPXACTXXGA

SEQ ID NO: 12081 - protein, 17 aa, Artificial Sequence
  Synthetically generated peptide
  VARIANT (1)..(17): Xaa = Any Amino Acid
CCEFACNXPXACTXGXA

SEQ ID NO: 12082 - protein, 16 aa, Artificial Sequence
  Synthetically generated peptide
  VARIANT (1)..(16): Xaa = Any Amino Acid
CCEFACNXPXACTGXA

SEQ ID NO: 12083 - protein, 17 aa, Artificial Sequence
  Synthetically generated peptide
  VARIANT (1)..(17): Xaa = Any Amino Acid
CCEFACNXPXACTGXXA

SEQ ID NO: 12084 - protein, 15 aa, Artificial Sequence
  Synthetically generated peptide
  VARIANT (1)..(15): Xaa = Any Amino Acid
CCEFACNXPAXCTGA

SEQ ID NO: 12085 - protein, 16 aa, Artificial Sequence
  Synthetically generated peptide
  VARIANT (1)..(16): Xaa = Any Amino Acid
CCEFACNXPAXXCTGA

SEQ ID NO: 12086 - protein, 17 aa, Artificial Sequence
  Synthetically generated peptide
  VARIANT (1)..(17): Xaa = Any Amino Acid
CCEFACNXPAXXXCTGA

SEQ ID NO: 12087 - protein, 17 aa, Artificial Sequence
  Synthetically generated peptide
  VARIANT (1)..(17): Xaa = Any Amino Acid
CCEFACNXPAXXCXTGA

SEQ ID NO: 12088 - protein, 17 aa, Artificial Sequence
  Synthetically generated peptide
  VARIANT (1)..(17): Xaa = Any Amino Acid
CCEFACNXPAXXCTXGA

SEQ ID NO: 12089 - protein, 17 aa, Artificial Sequence
  Synthetically generated peptide
  VARIANT (1)..(17): Xaa = Any Amino Acid
CCEFACNXPAXXCTGXA

SEQ ID NO: 12090 - protein, 16 aa, Artificial Sequence
  Synthetically generated peptide
  VARIANT (1)..(16): Xaa = Any Amino Acid
CCEFACNXPAXCXTGA

SEQ ID NO: 12091 - protein, 17 aa, Artificial Sequence
  Synthetically generated peptide
  VARIANT (1)..(17): Xaa = Any Amino Acid
CCEFACNXPAXCXXTGA

SEQ ID NO: 12092 - protein, 17 aa, Artificial Sequence
  Synthetically generated peptide
  VARIANT (1)..(17): Xaa = Any Amino Acid
CCEFACNXPAXCXTXGA

SEQ ID NO: 12093 - protein, 17 aa, Artificial Sequence
  Synthetically generated peptide
  VARIANT (1)..(17): Xaa = Any Amino Acid
CCEFACNXPAXCXTGXA

SEQ ID NO: 12094 - protein, 16 aa, Artificial Sequence
  Synthetically generated peptide
  VARIANT (1)..(16): Xaa = Any Amino Acid
CCEFACNXPAXCTXGA

SEQ ID NO: 12095 - protein, 17 aa, Artificial Sequence
  Synthetically generated peptide
  VARIANT (1)..(17): Xaa = Any Amino Acid
CCEFACNXPAXCTXXGA

SEQ ID NO: 12096 - protein, 17 aa, Artificial Sequence
  Synthetically generated peptide
  VARIANT (1)..(17): Xaa = Any Amino Acid
CCEFACNXPAXCTXGXA

SEQ ID NO: 12097 - protein, 16 aa, Artificial Sequence
  Synthetically generated peptide
  VARIANT (1)..(16): Xaa = Any Amino Acid
CCEFACNXPAXCTGXA

SEQ ID NO: 12098 - protein, 17 aa, Artificial Sequence
  Synthetically generated peptide
  VARIANT (1)..(17): Xaa = Any Amino Acid
CCEFACNXPAXCTGXXA

SEQ ID NO: 12099 - protein, 15 aa, Artificial Sequence
  Synthetically generated peptide
  VARIANT (1)..(15): Xaa = Any Amino Acid
CCEFACNXPACXTGA

SEQ ID NO: 12100 - protein, 16 aa, Artificial Sequence
  Synthetically generated peptide
  VARIANT (1)..(16): Xaa = Any Amino Acid
CCEFACNXPACXXTGA

SEQ ID NO: 12101 - protein, 17 aa, Artificial Sequence
  Synthetically generated peptide
  VARIANT (1)..(17): Xaa = Any Amino Acid
CCEFACNXPACXXXTGA

SEQ ID NO: 12102 - protein, 17 aa, Artificial Sequence
  Synthetically generated peptide
  VARIANT (1)..(17): Xaa = Any Amino Acid
CCEFACNXPACXXTXGA

SEQ ID NO: 12103 - protein, 17 aa, Artificial Sequence
  Synthetically generated peptide
  VARIANT (1)..(17): Xaa = Any Amino Acid
CCEFACNXPACXXTGXA

SEQ ID NO: 12104 - protein, 16 aa, Artificial Sequence
  Synthetically generated peptide
  VARIANT (1)..(16): Xaa = Any Amino Acid
CCEFACNXPACXTXGA

SEQ ID NO: 12105 - protein, 17 aa, Artificial Sequence
  Synthetically generated peptide
  VARIANT (1)..(17): Xaa = Any Amino Acid
CCEFACNXPACXTXXGA

SEQ ID NO: 12106 - protein, 17 aa, Artificial Sequence
  Synthetically generated peptide
  VARIANT (1)..(17): Xaa = Any Amino Acid
CCEFACNXPACXTXGXA

SEQ ID NO: 12107 - protein, 16 aa, Artificial Sequence
  Synthetically generated peptide
  VARIANT (1)..(16): Xaa = Any Amino Acid
CCEFACNXPACXTGXA

SEQ ID NO: 12108 - protein, 17 aa, Artificial Sequence
  Synthetically generated peptide
  VARIANT (1)..(17): Xaa = Any Amino Acid
CCEFACNXPACXTGXXA

SEQ ID NO: 12109 - protein, 15 aa, Artificial Sequence
  Synthetically generated peptide
  VARIANT (1)..(15): Xaa = Any Amino Acid
CCEFACNXPACTXGA

SEQ ID NO: 12110 - protein, 16 aa, Artificial Sequence
  Synthetically generated peptide
  VARIANT (1)..(16): Xaa = Any Amino Acid
CCEFACNXPACTXXGA

SEQ ID NO: 12111 - protein, 17 aa, Artificial Sequence
  Synthetically generated peptide
  VARIANT (1)..(17): Xaa = Any Amino Acid
CCEFACNXPACTXXXGA

SEQ ID NO: 12112 - protein, 17 aa, Artificial Sequence
  Synthetically generated peptide
  VARIANT (1)..(17): Xaa = Any Amino Acid
CCEFACNXPACTXXGXA

SEQ ID NO: 12113 - protein, 16 aa, Artificial Sequence
  Synthetically generated peptide
  VARIANT (1)..(16): Xaa = Any Amino Acid
CCEFACNXPACTXGXA

SEQ ID NO: 12114 - protein, 17 aa, Artificial Sequence
  Synthetically generated peptide
  VARIANT (1)..(17): Xaa = Any Amino Acid
CCEFACNXPACTXGXXA

SEQ ID NO: 12115 - protein, 15 aa, Artificial Sequence
  Synthetically generated peptide
  VARIANT (1)..(15): Xaa = Any Amino Acid
CCEFACNXPACTGXA

SEQ ID NO: 12116 - protein, 16 aa, Artificial Sequence
  Synthetically generated peptide
  VARIANT (1)..(16): Xaa = Any Amino Acid
CCEFACNXPACTGXXA

SEQ ID NO: 12117 - protein, 17 aa, Artificial Sequence
  Synthetically generated peptide
  VARIANT (1)..(17): Xaa = Any Amino Acid
CCEFACNXPACTGXXXA

SEQ ID NO: 12118 - protein, 14 aa, Artificial Sequence
  Synthetically generated peptide
  VARIANT (1)..(14): Xaa = Any Amino Acid
CCEFACNPXACTGA

SEQ ID NO: 12119 - protein, 15 aa, Artificial Sequence
  Synthetically generated peptide
  VARIANT (1)..(15): Xaa = Any Amino Acid
CCEFACNPXXACTGA

SEQ ID NO: 12120 - protein, 16 aa, Artificial Sequence
  Synthetically generated peptide
  VARIANT (1)..(16): Xaa = Any Amino Acid
CCEFACNPXXXACTGA

SEQ ID NO: 12121 - protein, 17 aa, Artificial Sequence
  Synthetically generated peptide
  VARIANT (1)..(17): Xaa = Any Amino Acid
CCEFACNPXXXXACTGA

SEQ ID NO: 12122 - protein, 17 aa, Artificial Sequence
  Synthetically generated peptide
  VARIANT (1)..(17): Xaa = Any Amino Acid
CCEFACNPXXXAXCTGA

SEQ ID NO: 12123 - protein, 17 aa, Artificial Sequence
  Synthetically generated peptide
  VARIANT (1)..(17): Xaa = Any Amino Acid
CCEFACNPXXXACXTGA

SEQ ID NO: 12124 - protein, 17 aa, Artificial Sequence
  Synthetically generated peptide
  VARIANT (1)..(17): Xaa = Any Amino Acid
CCEFACNPXXXACTXGA

SEQ ID NO: 12125 - protein, 17 aa, Artificial Sequence
  Synthetically generated peptide
  VARIANT (1)..(17): Xaa = Any Amino Acid
CCEFACNPXXXACTGXA

SEQ ID NO: 12126 - protein, 16 aa, Artificial Sequence
  Synthetically generated peptide
  VARIANT (1)..(16): Xaa = Any Amino Acid
CCEFACNPXXAXCTGA

SEQ ID NO: 12127 - protein, 17 aa, Artificial Sequence
  Synthetically generated peptide
  VARIANT (1)..(17): Xaa = Any Amino Acid
CCEFACNPXXAXXCTGA

SEQ ID NO: 12128 - protein, 17 aa, Artificial Sequence
  Synthetically generated peptide
  VARIANT (1)..(17): Xaa = Any Amino Acid
CCEFACNPXXAXCXTGA

SEQ ID NO: 12129 - protein, 17 aa, Artificial Sequence
  Synthetically generated peptide
  VARIANT (1)..(17): Xaa = Any Amino Acid
CCEFACNPXXAXCTXGA

SEQ ID NO: 12130 - protein, 17 aa, Artificial Sequence
  Synthetically generated peptide
  VARIANT (1)..(17): Xaa = Any Amino Acid
CCEFACNPXXAXCTGXA

SEQ ID NO: 12131 - protein, 16 aa, Artificial Sequence
  Synthetically generated peptide
  VARIANT (1)..(16): Xaa = Any Amino Acid
CCEFACNPXXACXTGA

SEQ ID NO: 12132 - protein, 17 aa, Artificial Sequence
  Synthetically generated peptide
  VARIANT (1)..(17): Xaa = Any Amino Acid
CCEFACNPXXACXXTGA

SEQ ID NO: 12133 - protein, 17 aa, Artificial Sequence
  Synthetically generated peptide
  VARIANT (1)..(17): Xaa = Any Amino Acid
CCEFACNPXXACXTXGA

SEQ ID NO: 12134 - protein, 17 aa, Artificial Sequence
  Synthetically generated peptide
  VARIANT (1)..(17): Xaa = Any Amino Acid
CCEFACNPXXACXTGXA

SEQ ID NO: 12135 - protein, 16 aa, Artificial Sequence
  Synthetically generated peptide
  VARIANT (1)..(16): Xaa = Any Amino Acid
CCEFACNPXXACTXGA

SEQ ID NO: 12136 - protein, 17 aa, Artificial Sequence
  Synthetically generated peptide
  VARIANT (1)..(17): Xaa = Any Amino Acid
CCEFACNPXXACTXXGA

SEQ ID NO: 12137 - protein, 17 aa, Artificial Sequence
  Synthetically generated peptide
  VARIANT (1)..(17): Xaa = Any Amino Acid
CCEFACNPXXACTXGXA

SEQ ID NO: 12138 - protein, 16 aa, Artificial Sequence
  Synthetically generated peptide
  VARIANT (1)..(16): Xaa = Any Amino Acid
CCEFACNPXXACTGXA

SEQ ID NO: 12139 - protein, 17 aa, Artificial Sequence
  Synthetically generated peptide
  VARIANT (1)..(17): Xaa = Any Amino Acid
CCEFACNPXXACTGXXA

SEQ ID NO: 12140 - protein, 15 aa, Artificial Sequence
  Synthetically generated peptide
  VARIANT (1)..(15): Xaa = Any Amino Acid
CCEFACNPXAXCTGA

SEQ ID NO: 12141 - protein, 16 aa, Artificial Sequence
  Synthetically generated peptide
  VARIANT (1)..(16): Xaa = Any Amino Acid
CCEFACNPXAXXCTGA

SEQ ID NO: 12142 - protein, 17 aa, Artificial Sequence
  Synthetically generated peptide
  VARIANT (1)..(17): Xaa = Any Amino Acid
CCEFACNPXAXXXCTGA

SEQ ID NO: 12143 - protein, 17 aa, Artificial Sequence
  Synthetically generated peptide
  VARIANT (1)..(17): Xaa = Any Amino Acid
CCEFACNPXAXXCXTGA

SEQ ID NO: 12144 - protein, 17 aa, Artificial Sequence
  Synthetically generated peptide
  VARIANT (1)..(17): Xaa = Any Amino Acid
CCEFACNPXAXXCTXGA

SEQ ID NO: 12145 - protein, 17 aa, Artificial Sequence
  Synthetically generated peptide
  VARIANT (1)..(17): Xaa = Any Amino Acid
CCEFACNPXAXXCTGXA

SEQ ID NO: 12146 - protein, 16 aa, Artificial Sequence
  Synthetically generated peptide
  VARIANT (1)..(16): Xaa = Any Amino Acid
CCEFACNPXAXCXTGA

SEQ ID NO: 12147 - protein, 17 aa, Artificial Sequence
  Synthetically generated peptide
  VARIANT (1)..(17): Xaa = Any Amino Acid
CCEFACNPXAXCXXTGA

SEQ ID NO: 12148 - protein, 17 aa, Artificial Sequence
  Synthetically generated peptide
  VARIANT (1)..(17): Xaa = Any Amino Acid
CCEFACNPXAXCXTXGA

SEQ ID NO: 12149 - protein, 17 aa, Artificial Sequence
  Synthetically generated peptide
  VARIANT (1)..(17): Xaa = Any Amino Acid
CCEFACNPXAXCXTGXA

SEQ ID NO: 12150 - protein, 16 aa, Artificial Sequence
  Synthetically generated peptide
  VARIANT (1)..(16): Xaa = Any Amino Acid
CCEFACNPXAXCTXGA

SEQ ID NO: 12151 - protein, 17 aa, Artificial Sequence
  Synthetically generated peptide
  VARIANT (1)..(17): Xaa = Any Amino Acid
CCEFACNPXAXCTXXGA

SEQ ID NO: 12152 - protein, 17 aa, Artificial Sequence
  Synthetically generated peptide
  VARIANT (1)..(17): Xaa = Any Amino Acid
CCEFACNPXAXCTXGXA

SEQ ID NO: 12153 - protein, 16 aa, Artificial Sequence
  Synthetically generated peptide
  VARIANT (1)..(16): Xaa = Any Amino Acid
CCEFACNPXAXCTGXA

SEQ ID NO: 12154 - protein, 17 aa, Artificial Sequence
  Synthetically generated peptide
  VARIANT (1)..(17): Xaa = Any Amino Acid
CCEFACNPXAXCTGXXA

SEQ ID NO: 12155 - protein, 15 aa, Artificial Sequence
  Synthetically generated peptide
  VARIANT (1)..(15): Xaa = Any Amino Acid
CCEFACNPXACXTGA

SEQ ID NO: 12156 - protein, 16 aa, Artificial Sequence
  Synthetically generated peptide
  VARIANT (1)..(16): Xaa = Any Amino Acid
CCEFACNPXACXXTGA

SEQ ID NO: 12157 - protein, 17 aa, Artificial Sequence
  Synthetically generated peptide
  VARIANT (1)..(17): Xaa = Any Amino Acid
CCEFACNPXACXXXTGA

SEQ ID NO: 12158 - protein, 17 aa, Artificial Sequence
  Synthetically generated peptide
  VARIANT (1)..(17): Xaa = Any Amino Acid
CCEFACNPXACXXTXGA

SEQ ID NO: 12159 - protein, 17 aa, Artificial Sequence
  Synthetically generated peptide
  VARIANT (1)..(17): Xaa = Any Amino Acid
CCEFACNPXACXXTGXA

SEQ ID NO: 12160 - protein, 16 aa, Artificial Sequence
  Synthetically generated peptide
  VARIANT (1)..(16): Xaa = Any Amino Acid
CCEFACNPXACXTXGA

SEQ ID NO: 12161 - protein, 17 aa, Artificial Sequence
  Synthetically generated peptide
  VARIANT (1)..(17): Xaa = Any Amino Acid
CCEFACNPXACXTXXGA

SEQ ID NO: 12162 - protein, 17 aa, Artificial Sequence
  Synthetically generated peptide
  VARIANT (1)..(17): Xaa = Any Amino Acid
CCEFACNPXACXTXGXA

SEQ ID NO: 12163 - protein, 16 aa, Artificial Sequence
  Synthetically generated peptide
  VARIANT (1)..(16): Xaa = Any Amino Acid
CCEFACNPXACXTGXA

SEQ ID NO: 12164 - protein, 17 aa, Artificial Sequence
  Synthetically generated peptide
  VARIANT (1)..(17): Xaa = Any Amino Acid
CCEFACNPXACXTGXXA

SEQ ID NO: 12165 - protein, 15 aa, Artificial Sequence
  Synthetically generated peptide
  VARIANT (1)..(15): Xaa = Any Amino Acid
CCEFACNPXACTXGA

SEQ ID NO: 12166 - protein, 16 aa, Artificial Sequence
  Synthetically generated peptide
  VARIANT (1)..(16): Xaa = Any Amino Acid
CCEFACNPXACTXXGA

SEQ ID NO: 12167 - protein, 17 aa, Artificial Sequence
  Synthetically generated peptide
  VARIANT (1)..(17): Xaa = Any Amino Acid
CCEFACNPXACTXXXGA

SEQ ID NO: 12168 - protein, 17 aa, Artificial Sequence
  Synthetically generated peptide
  VARIANT (1)..(17): Xaa = Any Amino Acid
CCEFACNPXACTXXGXA

SEQ ID NO: 12169 - protein, 16 aa, Artificial Sequence
  Synthetically generated peptide
  VARIANT (1)..(16): Xaa = Any Amino Acid
CCEFACNPXACTXGXA

SEQ ID NO: 12170 - protein, 17 aa, Artificial Sequence
  Synthetically generated peptide
  VARIANT (1)..(17): Xaa = Any Amino Acid
CCEFACNPXACTXGXXA

SEQ ID NO: 12171 - protein, 15 aa, Artificial Sequence
  Synthetically generated peptide
  VARIANT (1)..(15): Xaa = Any Amino Acid
CCEFACNPXACTGXA

SEQ ID NO: 12172 - protein, 16 aa, Artificial Sequence
  Synthetically generated peptide
  VARIANT (1)..(16): Xaa = Any Amino Acid
CCEFACNPXACTGXXA

SEQ ID NO: 12173 - protein, 17 aa, Artificial Sequence
  Synthetically generated peptide
  VARIANT (1)..(17): Xaa = Any Amino Acid
CCEFACNPXACTGXXXA

SEQ ID NO: 12174 - protein, 14 aa, Artificial Sequence
  Synthetically generated peptide
  VARIANT (1)..(14): Xaa = Any Amino Acid
CCEFACNPAXCTGA

SEQ ID NO: 12175 - protein, 15 aa, Artificial Sequence
  Synthetically generated peptide
  VARIANT (1)..(15): Xaa = Any Amino Acid
CCEFACNPAXXCTGA

SEQ ID NO: 12176 - protein, 16 aa, Artificial Sequence
  Synthetically generated peptide
  VARIANT (1)..(16): Xaa = Any Amino Acid
CCEFACNPAXXXCTGA

SEQ ID NO: 12177 - protein, 17 aa, Artificial Sequence
  Synthetically generated peptide
  VARIANT (1)..(17): Xaa = Any Amino Acid
CCEFACNPAXXXXCTGA

SEQ ID NO: 12178 - protein, 17 aa, Artificial Sequence
  Synthetically generated peptide
  VARIANT (1)..(17): Xaa = Any Amino Acid
CCEFACNPAXXXCXTGA

SEQ ID NO: 12179 - protein, 17 aa, Artificial Sequence
  Synthetically generated peptide
  VARIANT (1)..(17): Xaa = Any Amino Acid
CCEFACNPAXXXCTXGA

SEQ ID NO: 12180 - protein, 17 aa, Artificial Sequence
  Synthetically generated peptide
  VARIANT (1)..(17): Xaa = Any Amino Acid
CCEFACNPAXXXCTGXA

SEQ ID NO: 12181 - protein, 16 aa, Artificial Sequence
  Synthetically generated peptide
  VARIANT (1)..(16): Xaa = Any Amino Acid
CCEFACNPAXXCXTGA

SEQ ID NO: 12182 - protein, 17 aa, Artificial Sequence
  Synthetically generated peptide
  VARIANT (1)..(17): Xaa = Any Amino Acid
CCEFACNPAXXCXXTGA

SEQ ID NO: 12183 - protein, 17 aa, Artificial Sequence
  Synthetically generated peptide
  VARIANT (1)..(17): Xaa = Any Amino Acid
CCEFACNPAXXCXTXGA

SEQ ID NO: 12184 - protein, 17 aa, Artificial Sequence
  Synthetically generated peptide
  VARIANT (1)..(17): Xaa = Any Amino Acid
CCEFACNPAXXCXTGXA

SEQ ID NO: 12185 - protein, 16 aa, Artificial Sequence
  Synthetically generated peptide
  VARIANT (1)..(16): Xaa = Any Amino Acid
CCEFACNPAXXCTXGA

SEQ ID NO: 12186 - protein, 17 aa, Artificial Sequence
  Synthetically generated peptide
  VARIANT (1)..(17): Xaa = Any Amino Acid
CCEFACNPAXXCTXXGA

SEQ ID NO: 12187 - protein, 17 aa, Artificial Sequence
  Synthetically generated peptide
  VARIANT (1)..(17): Xaa = Any Amino Acid
CCEFACNPAXXCTXGXA

SEQ ID NO: 12188 - protein, 16 aa, Artificial Sequence
  Synthetically generated peptide
  VARIANT (1)..(16): Xaa = Any Amino Acid
CCEFACNPAXXCTGXA

SEQ ID NO: 12189 - protein, 17 aa, Artificial Sequence
  Synthetically generated peptide
  VARIANT (1)..(17): Xaa = Any Amino Acid
CCEFACNPAXXCTGXXA

SEQ ID NO: 12190 - protein, 15 aa, Artificial Sequence
  Synthetically generated peptide
  VARIANT (1)..(15): Xaa = Any Amino Acid
CCEFACNPAXCXTGA

SEQ ID NO: 12191 - protein, 16 aa, Artificial Sequence
  Synthetically generated peptide
  VARIANT (1)..(16): Xaa = Any Amino Acid
CCEFACNPAXCXXTGA

SEQ ID NO: 12192 - protein, 17 aa, Artificial Sequence
  Synthetically generated peptide
  VARIANT (1)..(17): Xaa = Any Amino Acid
CCEFACNPAXCXXXTGA

SEQ ID NO: 12193 - protein, 17 aa, Artificial Sequence
  Synthetically generated peptide
  VARIANT (1)..(17): Xaa = Any Amino Acid
CCEFACNPAXCXXTXGA

SEQ ID NO: 12194 - protein, 17 aa, Artificial Sequence
  Synthetically generated peptide
  VARIANT (1)..(17): Xaa = Any Amino Acid
CCEFACNPAXCXXTGXA

SEQ ID NO: 12195 - protein, 16 aa, Artificial Sequence
  Synthetically generated peptide
  VARIANT (1)..(16): Xaa = Any Amino Acid
CCEFACNPAXCXTXGA

SEQ ID NO: 12196 - protein, 17 aa, Artificial Sequence
  Synthetically generated peptide
  VARIANT (1)..(17): Xaa = Any Amino Acid
CCEFACNPAXCXTXXGA

SEQ ID NO: 12197 - protein, 17 aa, Artificial Sequence
  Synthetically generated peptide
  VARIANT (1)..(17): Xaa = Any Amino Acid
CCEFACNPAXCXTXGXA

SEQ ID NO: 12198 - protein, 16 aa, Artificial Sequence
  Synthetically generated peptide
  VARIANT (1)..(16): Xaa = Any Amino Acid
CCEFACNPAXCXTGXA

SEQ ID NO: 12199 - protein, 17 aa, Artificial Sequence
  Synthetically generated peptide
  VARIANT (1)..(17): Xaa = Any Amino Acid
CCEFACNPAXCXTGXXA

SEQ ID NO: 12200 - protein, 15 aa, Artificial Sequence
  Synthetically generated peptide
  VARIANT (1)..(15): Xaa = Any Amino Acid
CCEFACNPAXCTXGA

SEQ ID NO: 12201 - protein, 16 aa, Artificial Sequence
  Synthetically generated peptide
  VARIANT (1)..(16): Xaa = Any Amino Acid
CCEFACNPAXCTXXGA

SEQ ID NO: 12202 - protein, 17 aa, Artificial Sequence
  Synthetically generated peptide
  VARIANT (1)..(17): Xaa = Any Amino Acid
CCEFACNPAXCTXXXGA

SEQ ID NO: 12203 - protein, 17 aa, Artificial Sequence
  Synthetically generated peptide
  VARIANT (1)..(17): Xaa = Any Amino Acid
CCEFACNPAXCTXXGXA

SEQ ID NO: 12204 - protein, 16 aa, Artificial Sequence
  Synthetically generated peptide
  VARIANT (1)..(16): Xaa = Any Amino Acid
CCEFACNPAXCTXGXA

SEQ ID NO: 12205 - protein, 17 aa, Artificial Sequence
  Synthetically generated peptide
  VARIANT (1)..(17): Xaa = Any Amino Acid
CCEFACNPAXCTXGXXA

SEQ ID NO: 12206 - protein, 15 aa, Artificial Sequence
  Synthetically generated peptide
  VARIANT (1)..(15): Xaa = Any Amino Acid
CCEFACNPAXCTGXA

SEQ ID NO: 12207 - protein, 16 aa, Artificial Sequence
  Synthetically generated peptide
  VARIANT (1)..(16): Xaa = Any Amino Acid
CCEFACNPAXCTGXXA

SEQ ID NO: 12208 - protein, 17 aa, Artificial Sequence
  Synthetically generated peptide
  VARIANT (1)..(17): Xaa = Any Amino Acid
CCEFACNPAXCTGXXXA

SEQ ID NO: 12209 - protein, 14 aa, Artificial Sequence
  Synthetically generated peptide
  VARIANT (1)..(14): Xaa = Any Amino Acid
CCEFACNPACXTGA

SEQ ID NO: 12210 - protein, 15 aa, Artificial Sequence
  Synthetically generated peptide
  VARIANT (1)..(15): Xaa = Any Amino Acid
CCEFACNPACXXTGA

SEQ ID NO: 12211 - protein, 16 aa, Artificial Sequence
  Synthetically generated peptide
  VARIANT (1)..(16): Xaa = Any Amino Acid
CCEFACNPACXXXTGA

SEQ ID NO: 12212 - protein, 17 aa, Artificial Sequence
  Synthetically generated peptide
  VARIANT (1)..(17): Xaa = Any Amino Acid
CCEFACNPACXXXXTGA

SEQ ID NO: 12213 - protein, 17 aa, Artificial Sequence
  Synthetically generated peptide
  VARIANT (1)..(17): Xaa = Any Amino Acid
CCEFACNPACXXXTXGA

SEQ ID NO: 12214 - protein, 17 aa, Artificial Sequence
  Synthetically generated peptide
  VARIANT (1)..(17): Xaa = Any Amino Acid
CCEFACNPACXXXTGXA

SEQ ID NO: 12215 - protein, 16 aa, Artificial Sequence
  Synthetically generated peptide
  VARIANT (1)..(16): Xaa = Any Amino Acid
CCEFACNPACXXTXGA

SEQ ID NO: 12216 - protein, 17 aa, Artificial Sequence
  Synthetically generated peptide
  VARIANT (1)..(17): Xaa = Any Amino Acid
CCEFACNPACXXTXXGA

SEQ ID NO: 12217 - protein, 17 aa, Artificial Sequence
  Synthetically generated peptide
  VARIANT (1)..(17): Xaa = Any Amino Acid
CCEFACNPACXXTXGXA

SEQ ID NO: 12218 - protein, 16 aa, Artificial Sequence
  Synthetically generated peptide
  VARIANT (1)..(16): Xaa = Any Amino Acid
CCEFACNPACXXTGXA

SEQ ID NO: 12219 - protein, 17 aa, Artificial Sequence
  Synthetically generated peptide
  VARIANT (1)..(17): Xaa = Any Amino Acid
CCEFACNPACXXTGXXA

SEQ ID NO: 12220 - protein, 15 aa, Artificial Sequence
  Synthetically generated peptide
  VARIANT (1)..(15): Xaa = Any Amino Acid
CCEFACNPACXTXGA

SEQ ID NO: 12221 - protein, 16 aa, Artificial Sequence
  Synthetically generated peptide
  VARIANT (1)..(16): Xaa = Any Amino Acid
CCEFACNPACXTXXGA

SEQ ID NO: 12222 - protein, 17 aa, Artificial Sequence
  Synthetically generated peptide
  VARIANT (1)..(17): Xaa = Any Amino Acid
CCEFACNPACXTXXXGA

SEQ ID NO: 12223 - protein, 17 aa, Artificial Sequence
  Synthetically generated peptide
  VARIANT (1)..(17): Xaa = Any Amino Acid
CCEFACNPACXTXXGXA

SEQ ID NO: 12224 - protein, 16 aa, Artificial Sequence
  Synthetically generated peptide
  VARIANT (1)..(16): Xaa = Any Amino Acid
CCEFACNPACXTXGXA

SEQ ID NO: 12225 - protein, 17 aa, Artificial Sequence
  Synthetically generated peptide
  VARIANT (1)..(17): Xaa = Any Amino Acid
CCEFACNPACXTXGXXA

SEQ ID NO: 12226 - protein, 15 aa, Artificial Sequence
  Synthetically generated peptide
  VARIANT (1)..(15): Xaa = Any Amino Acid
CCEFACNPACXTGXA

SEQ ID NO: 12227 - protein, 16 aa, Artificial Sequence
  Synthetically generated peptide
  VARIANT (1)..(16): Xaa = Any Amino Acid
CCEFACNPACXTGXXA

SEQ ID NO: 12228 - protein, 17 aa, Artificial Sequence
  Synthetically generated peptide
  VARIANT (1)..(17): Xaa = Any Amino Acid
CCEFACNPACXTGXXXA

SEQ ID NO: 12229 - protein, 14 aa, Artificial Sequence
  Synthetically generated peptide
  VARIANT (1)..(14): Xaa = Any Amino Acid
CCEFACNPACTXGA

SEQ ID NO: 12230 - protein, 15 aa, Artificial Sequence
  Synthetically generated peptide
  VARIANT (1)..(15): Xaa = Any Amino Acid
CCEFACNPACTXXGA

SEQ ID NO: 12231 - protein, 16 aa, Artificial Sequence
  Synthetically generated peptide
  VARIANT (1)..(16): Xaa = Any Amino Acid
CCEFACNPACTXXXGA

SEQ ID NO: 12232 - protein, 17 aa, Artificial Sequence
  Synthetically generated peptide
  VARIANT (1)..(17): Xaa = Any Amino Acid
CCEFACNPACTXXXXGA

SEQ ID NO: 12233 - protein, 17 aa, Artificial Sequence
  Synthetically generated peptide
  VARIANT (1)..(17): Xaa = Any Amino Acid
CCEFACNPACTXXXGXA

SEQ ID NO: 12234 - protein, 16 aa, Artificial Sequence
  Synthetically generated peptide
  VARIANT (1)..(16): Xaa = Any Amino Acid
CCEFACNPACTXXGXA

SEQ ID NO: 12235 - protein, 17 aa, Artificial Sequence
  Synthetically generated peptide
  VARIANT (1)..(17): Xaa = Any Amino Acid
CCEFACNPACTXXGXXA

SEQ ID NO: 12236 - protein, 15 aa, Artificial Sequence
  Synthetically generated peptide
  VARIANT (1)..(15): Xaa = Any Amino Acid
CCEFACNPACTXGXA

SEQ ID NO: 12237 - protein, 16 aa, Artificial Sequence
  Synthetically generated peptide
  VARIANT (1)..(16): Xaa = Any Amino Acid
CCEFACNPACTXGXXA

SEQ ID NO: 12238 - protein, 17 aa, Artificial Sequence
  Synthetically generated peptide
  VARIANT (1)..(17): Xaa = Any Amino Acid
CCEFACNPACTXGXXXA

SEQ ID NO: 12239 - protein, 14 aa, Artificial Sequence
  Synthetically generated peptide
  VARIANT (1)..(14): Xaa = Any Amino Acid
CCEFACNPACTGXA

SEQ ID NO: 12240 - protein, 15 aa, Artificial Sequence
  Synthetically generated peptide
  VARIANT (1)..(15): Xaa = Any Amino Acid
CCEFACNPACTGXXA

SEQ ID NO: 12241 - protein, 16 aa, Artificial Sequence
  Synthetically generated peptide
  VARIANT (1)..(16): Xaa = Any Amino Acid
CCEFACNPACTGXXXA

SEQ ID NO: 12242 - protein, 17 aa, Artificial Sequence
  Synthetically generated peptide
  VARIANT (1)..(17): Xaa = Any Amino Acid
CCEFACNPACTGXXXXA

SEQ ID NO: 12243 - protein, 14 aa, Artificial Sequence
  Synthetically generated peptide
  VARIANT (1)..(14): Xaa = Any Amino Acid
ACXEWCANPACTGC

SEQ ID NO: 12244 - protein, 15 aa, Artificial Sequence
  Synthetically generated peptide
  VARIANT (1)..(15): Xaa = Any Amino Acid
ACXXEWCANPACTGC

SEQ ID NO: 12245 - protein, 16 aa, Artificial Sequence
  Synthetically generated peptide
  VARIANT (1)..(16): Xaa = Any Amino Acid
ACXXXEWCANPACTGC

SEQ ID NO: 12246 - protein, 17 aa, Artificial Sequence
  Synthetically generated peptide
  VARIANT (1)..(17): Xaa = Any Amino Acid
ACXXXXEWCANPACTGC

SEQ ID NO: 12247 - protein, 17 aa, Artificial Sequence
  Synthetically generated peptide
  VARIANT (1)..(17): Xaa = Any Amino Acid
ACXXXEXWCANPACTGC

SEQ ID NO: 12248 - protein, 17 aa, Artificial Sequence
  Synthetically generated peptide
  VARIANT (1)..(17): Xaa = Any Amino Acid
ACXXXEWXCANPACTGC

SEQ ID NO: 12249 - protein, 17 aa, Artificial Sequence
  Synthetically generated peptide
  VARIANT (1)..(17): Xaa = Any Amino Acid
ACXXXEWCAXNPACTGC

SEQ ID NO: 12250 - protein, 17 aa, Artificial Sequence
  Synthetically generated peptide
  VARIANT (1)..(17): Xaa = Any Amino Acid
ACXXXEWCANXPACTGC

SEQ ID NO: 12251 - protein, 17 aa, Artificial Sequence
  Synthetically generated peptide
  VARIANT (1)..(17): Xaa = Any Amino Acid
ACXXXEWCANPXACTGC

SEQ ID NO: 12252 - protein, 17 aa, Artificial Sequence
  Synthetically generated peptide
  VARIANT (1)..(17): Xaa = Any Amino Acid
ACXXXEWCANPAXCTGC

SEQ ID NO: 12253 - protein, 17 aa, Artificial Sequence
  Synthetically generated peptide
  VARIANT (1)..(17): Xaa = Any Amino Acid
ACXXXEWCANPACXTGC

SEQ ID NO: 12254 - protein, 17 aa, Artificial Sequence
  Synthetically generated peptide
  VARIANT (1)..(17): Xaa = Any Amino Acid
ACXXXEWCANPACTXGC

SEQ ID NO: 12255 - protein, 17 aa, Artificial Sequence
  Synthetically generated peptide
  VARIANT (1)..(17): Xaa = Any Amino Acid
ACXXXEWCANPACTGXC

SEQ ID NO: 12256 - protein, 16 aa, Artificial Sequence
  Synthetically generated peptide
  VARIANT (1)..(16): Xaa = Any Amino Acid
ACXXEXWCANPACTGC

SEQ ID NO: 12257 - protein, 17 aa, Artificial Sequence
  Synthetically generated peptide
  VARIANT (1)..(17): Xaa = Any Amino Acid
ACXXEXXWCANPACTGC

SEQ ID NO: 12258 - protein, 17 aa, Artificial Sequence
  Synthetically generated peptide
  VARIANT (1)..(17): Xaa = Any Amino Acid
ACXXEXWXCANPACTGC

SEQ ID NO: 12259 - protein, 17 aa, Artificial Sequence
  Synthetically generated peptide
  VARIANT (1)..(17): Xaa = Any Amino Acid
ACXXEXWCAXNPACTGC

SEQ ID NO: 12260 - protein, 17 aa, Artificial Sequence
  Synthetically generated peptide
  VARIANT (1)..(17): Xaa = Any Amino Acid
ACXXEXWCANXPACTGC

SEQ ID NO: 12261 - protein, 17 aa, Artificial Sequence
  Synthetically generated peptide
  VARIANT (1)..(17): Xaa = Any Amino Acid
ACXXEXWCANPXACTGC

SEQ ID NO: 12262 - protein, 17 aa, Artificial Sequence
  Synthetically generated peptide
  VARIANT (1)..(17): Xaa = Any Amino Acid
ACXXEXWCANPAXCTGC

SEQ ID NO: 12263 - protein, 17 aa, Artificial Sequence
  Synthetically generated peptide
  VARIANT (1)..(17): Xaa = Any Amino Acid
ACXXEXWCANPACXTGC

SEQ ID NO: 12264 - protein, 17 aa, Artificial Sequence
  Synthetically generated peptide
  VARIANT (1)..(17): Xaa = Any Amino Acid
ACXXEXWCANPACTXGC

SEQ ID NO: 12265 - protein, 17 aa, Artificial Sequence
  Synthetically generated peptide
  VARIANT (1)..(17): Xaa = Any Amino Acid
ACXXEXWCANPACTGXC

SEQ ID NO: 12266 - protein, 16 aa, Artificial Sequence
  Synthetically generated peptide
  VARIANT (1)..(16): Xaa = Any Amino Acid
ACXXEWXCANPACTGC

SEQ ID NO: 12267 - protein, 17 aa, Artificial Sequence
  Synthetically generated peptide
  VARIANT (1)..(17): Xaa = Any Amino Acid
ACXXEWXXCANPACTGC

SEQ ID NO: 12268 - protein, 17 aa, Artificial Sequence
  Synthetically generated peptide
  VARIANT (1)..(17): Xaa = Any Amino Acid
ACXXEWXCAXNPACTGC

SEQ ID NO: 12269 - protein, 17 aa, Artificial Sequence
  Synthetically generated peptide
  VARIANT (1)..(17): Xaa = Any Amino Acid
ACXXEWXCANXPACTGC

SEQ ID NO: 12270 - protein, 17 aa, Artificial Sequence
  Synthetically generated peptide
  VARIANT (1)..(17): Xaa = Any Amino Acid
ACXXEWXCANPXACTGC

SEQ ID NO: 12271 - protein, 17 aa, Artificial Sequence
  Synthetically generated peptide
  VARIANT (1)..(17): Xaa = Any Amino Acid
ACXXEWXCANPAXCTGC

SEQ ID NO: 12272 - protein, 17 aa, Artificial Sequence
  Synthetically generated peptide
  VARIANT (1)..(17): Xaa = Any Amino Acid
ACXXEWXCANPACXTGC

SEQ ID NO: 12273 - protein, 17 aa, Artificial Sequence
  Synthetically generated peptide
  VARIANT (1)..(17): Xaa = Any Amino Acid
ACXXEWXCANPACTXGC

SEQ ID NO: 12274 - protein, 17 aa, Artificial Sequence
  Synthetically generated peptide
  VARIANT (1)..(17): Xaa = Any Amino Acid
ACXXEWXCANPACTGXC

SEQ ID NO: 12275 - protein, 16 aa, Artificial Sequence
  Synthetically generated peptide
  VARIANT (1)..(16): Xaa = Any Amino Acid
ACXXEWCAXNPACTGC

SEQ ID NO: 12276 - protein, 17 aa, Artificial Sequence
  Synthetically generated peptide
  VARIANT (1)..(17): Xaa = Any Amino Acid
ACXXEWCAXXNPACTGC

SEQ ID NO: 12277 - protein, 17 aa, Artificial Sequence
  Synthetically generated peptide
  VARIANT (1)..(17): Xaa = Any Amino Acid
ACXXEWCAXNXPACTGC

SEQ ID NO: 12278 - protein, 17 aa, Artificial Sequence
  Synthetically generated peptide
  VARIANT (1)..(17): Xaa = Any Amino Acid
ACXXEWCAXNPXACTGC

SEQ ID NO: 12279 - protein, 17 aa, Artificial Sequence
  Synthetically generated peptide
  VARIANT (1)..(17): Xaa = Any Amino Acid
ACXXEWCAXNPAXCTGC

SEQ ID NO: 12280 - protein, 17 aa, Artificial Sequence
  Synthetically generated peptide
  VARIANT (1)..(17): Xaa = Any Amino Acid
ACXXEWCAXNPACXTGC

SEQ ID NO: 12281 - protein, 17 aa, Artificial Sequence
  Synthetically generated peptide
  VARIANT (1)..(17): Xaa = Any Amino Acid
ACXXEWCAXNPACTXGC

SEQ ID NO: 12282 - protein, 17 aa, Artificial Sequence
  Synthetically generated peptide
  VARIANT (1)..(17): Xaa = Any Amino Acid
ACXXEWCAXNPACTGXC

SEQ ID NO: 12283 - protein, 16 aa, Artificial Sequence
  Synthetically generated peptide
  VARIANT (1)..(16): Xaa = Any Amino Acid
ACXXEWCANXPACTGC

SEQ ID NO: 12284 - protein, 17 aa, Artificial Sequence
  Synthetically generated peptide
  VARIANT (1)..(17): Xaa = Any Amino Acid
ACXXEWCANXXPACTGC

SEQ ID NO: 12285 - protein, 17 aa, Artificial Sequence
  Synthetically generated peptide
  VARIANT (1)..(17): Xaa = Any Amino Acid
ACXXEWCANXPXACTGC

SEQ ID NO: 12286 - protein, 17 aa, Artificial Sequence
  Synthetically generated peptide
  VARIANT (1)..(17): Xaa = Any Amino Acid
ACXXEWCANXPAXCTGC

SEQ ID NO: 12287 - protein, 17 aa, Artificial Sequence
  Synthetically generated peptide
  VARIANT (1)..(17): Xaa = Any Amino Acid
ACXXEWCANXPACXTGC

SEQ ID NO: 12288 - protein, 17 aa, Artificial Sequence
  Synthetically generated peptide
  VARIANT (1)..(17): Xaa = Any Amino Acid
ACXXEWCANXPACTXGC

SEQ ID NO: 12289 - protein, 17 aa, Artificial Sequence
  Synthetically generated peptide
  VARIANT (1)..(17): Xaa = Any Amino Acid
ACXXEWCANXPACTGXC

SEQ ID NO: 12290 - protein, 16 aa, Artificial Sequence
  Synthetically generated peptide
  VARIANT (1)..(16): Xaa = Any Amino Acid
ACXXEWCANPXACTGC

SEQ ID NO: 12291 - protein, 17 aa, Artificial Sequence
  Synthetically generated peptide
  VARIANT (1)..(17): Xaa = Any Amino Acid
ACXXEWCANPXXACTGC

SEQ ID NO: 12292 - protein, 17 aa, Artificial Sequence
  Synthetically generated peptide
  VARIANT (1)..(17): Xaa = Any Amino Acid
ACXXEWCANPXAXCTGC

SEQ ID NO: 12293 - protein, 17 aa, Artificial Sequence
  Synthetically generated peptide
  VARIANT (1)..(17): Xaa = Any Amino Acid
ACXXEWCANPXACXTGC

SEQ ID NO: 12294 - protein, 17 aa, Artificial Sequence
  Synthetically generated peptide
  VARIANT (1)..(17): Xaa = Any Amino Acid
ACXXEWCANPXACTXGC

SEQ ID NO: 12295 - protein, 17 aa, Artificial Sequence
  Synthetically generated peptide
  VARIANT (1)..(17): Xaa = Any Amino Acid
ACXXEWCANPXACTGXC

SEQ ID NO: 12296 - protein, 16 aa, Artificial Sequence
  Synthetically generated peptide
  VARIANT (1)..(16): Xaa = Any Amino Acid
ACXXEWCANPAXCTGC

SEQ ID NO: 12297 - protein, 17 aa, Artificial Sequence
  Synthetically generated peptide
  VARIANT (1)..(17): Xaa = Any Amino Acid
ACXXEWCANPAXXCTGC

SEQ ID NO: 12298 - protein, 17 aa, Artificial Sequence
  Synthetically generated peptide
  VARIANT (1)..(17): Xaa = Any Amino Acid
ACXXEWCANPAXCXTGC

SEQ ID NO: 12299 - protein, 17 aa, Artificial Sequence
  Synthetically generated peptide
  VARIANT (1)..(17): Xaa = Any Amino Acid
ACXXEWCANPAXCTXGC

SEQ ID NO: 12300 - protein, 17 aa, Artificial Sequence
  Synthetically generated peptide
  VARIANT (1)..(17): Xaa = Any Amino Acid
ACXXEWCANPAXCTGXC

SEQ ID NO: 12301 - protein, 16 aa, Artificial Sequence
  Synthetically generated peptide
  VARIANT (1)..(16): Xaa = Any Amino Acid
ACXXEWCANPACXTGC

SEQ ID NO: 12302 - protein, 17 aa, Artificial Sequence
  Synthetically generated peptide
  VARIANT (1)..(17): Xaa = Any Amino Acid
ACXXEWCANPACXXTGC

SEQ ID NO: 12303 - protein, 17 aa, Artificial Sequence
  Synthetically generated peptide
  VARIANT (1)..(17): Xaa = Any Amino Acid
ACXXEWCANPACXTXGC

SEQ ID NO: 12304 - protein, 17 aa, Artificial Sequence
  Synthetically generated peptide
  VARIANT (1)..(17): Xaa = Any Amino Acid
ACXXEWCANPACXTGXC

SEQ ID NO: 12305 - protein, 16 aa, Artificial Sequence
  Synthetically generated peptide
  VARIANT (1)..(16): Xaa = Any Amino Acid
ACXXEWCANPACTXGC

SEQ ID NO: 12306 - protein, 17 aa, Artificial Sequence
  Synthetically generated peptide
  VARIANT (1)..(17): Xaa = Any Amino Acid
ACXXEWCANPACTXXGC

SEQ ID NO: 12307 - protein, 17 aa, Artificial Sequence
  Synthetically generated peptide
  VARIANT (1)..(17): Xaa = Any Amino Acid
ACXXEWCANPACTXGXC

SEQ ID NO: 12308 - protein, 16 aa, Artificial Sequence
  Synthetically generated peptide
  VARIANT (1)..(16): Xaa = Any Amino Acid
ACXXEWCANPACTGXC

SEQ ID NO: 12309 - protein, 17 aa, Artificial Sequence
  Synthetically generated peptide
  VARIANT (1)..(17): Xaa = Any Amino Acid
ACXXEWCANPACTGXXC

SEQ ID NO: 12310 - protein, 15 aa, Artificial Sequence
  Synthetically generated peptide
  VARIANT (1)..(15): Xaa = Any Amino Acid
ACXEXWCANPACTGC

SEQ ID NO: 12311 - protein, 16 aa, Artificial Sequence
  Synthetically generated peptide
  VARIANT (1)..(16): Xaa = Any Amino Acid
ACXEXXWCANPACTGC

SEQ ID NO: 12312 - protein, 17 aa, Artificial Sequence
  Synthetically generated peptide
  VARIANT (1)..(17): Xaa = Any Amino Acid
ACXEXXXWCANPACTGC

SEQ ID NO: 12313 - protein, 17 aa, Artificial Sequence
  Synthetically generated peptide
  VARIANT (1)..(17): Xaa = Any Amino Acid
ACXEXXWXCANPACTGC

SEQ ID NO: 12314 - protein, 17 aa, Artificial Sequence
  Synthetically generated peptide
  VARIANT (1)..(17): Xaa = Any Amino Acid
ACXEXXWCAXNPACTGC

SEQ ID NO: 12315 - protein, 17 aa, Artificial Sequence
  Synthetically generated peptide
  VARIANT (1)..(17): Xaa = Any Amino Acid
ACXEXXWCANXPACTGC

SEQ ID NO: 12316 - protein, 17 aa, Artificial Sequence
  Synthetically generated peptide
  VARIANT (1)..(17): Xaa = Any Amino Acid
ACXEXXWCANPXACTGC

SEQ ID NO: 12317 - protein, 17 aa, Artificial Sequence
  Synthetically generated peptide
  VARIANT (1)..(17): Xaa = Any Amino Acid
ACXEXXWCANPAXCTGC

SEQ ID NO: 12318 - protein, 17 aa, Artificial Sequence
  Synthetically generated peptide
  VARIANT (1)..(17): Xaa = Any Amino Acid
ACXEXXWCANPACXTGC

SEQ ID NO: 12319 - protein, 17 aa, Artificial Sequence
  Synthetically generated peptide
  VARIANT (1)..(17): Xaa = Any Amino Acid
ACXEXXWCANPACTXGC

SEQ ID NO: 12320 - protein, 17 aa, Artificial Sequence
  Synthetically generated peptide
  VARIANT (1)..(17): Xaa = Any Amino Acid
ACXEXXWCANPACTGXC

SEQ ID NO: 12321 - protein, 16 aa, Artificial Sequence
  Synthetically generated peptide
  VARIANT (1)..(16): Xaa = Any Amino Acid
ACXEXWXCANPACTGC

SEQ ID NO: 12322 - protein, 17 aa, Artificial Sequence
  Synthetically generated peptide
  VARIANT (1)..(17): Xaa = Any Amino Acid
ACXEXWXXCANPACTGC

SEQ ID NO: 12323 - protein, 17 aa, Artificial Sequence
  Synthetically generated peptide
  VARIANT (1)..(17): Xaa = Any Amino Acid
ACXEXWXCAXNPACTGC

SEQ ID NO: 12324 - protein, 17 aa, Artificial Sequence
  Synthetically generated peptide
  VARIANT (1)..(17): Xaa = Any Amino Acid
ACXEXWXCANXPACTGC

SEQ ID NO: 12325 - protein, 17 aa, Artificial Sequence
  Synthetically generated peptide
  VARIANT (1)..(17): Xaa = Any Amino Acid
ACXEXWXCANPXACTGC

SEQ ID NO: 12326 - protein, 17 aa, Artificial Sequence
  Synthetically generated peptide
  VARIANT (1)..(17): Xaa = Any Amino Acid
ACXEXWXCANPAXCTGC

SEQ ID NO: 12327 - protein, 17 aa, Artificial Sequence
  Synthetically generated peptide
  VARIANT (1)..(17): Xaa = Any Amino Acid
ACXEXWXCANPACXTGC

SEQ ID NO: 12328 - protein, 17 aa, Artificial Sequence
  Synthetically generated peptide
  VARIANT (1)..(17): Xaa = Any Amino Acid
ACXEXWXCANPACTXGC

SEQ ID NO: 12329 - protein, 17 aa, Artificial Sequence
  Synthetically generated peptide
  VARIANT (1)..(17): Xaa = Any Amino Acid
ACXEXWXCANPACTGXC

SEQ ID NO: 12330 - protein, 16 aa, Artificial Sequence
  Synthetically generated peptide
  VARIANT (1)..(16): Xaa = Any Amino Acid
ACXEXWCAXNPACTGC

SEQ ID NO: 12331 - protein, 17 aa, Artificial Sequence
  Synthetically generated peptide
  VARIANT (1)..(17): Xaa = Any Amino Acid
ACXEXWCAXXNPACTGC

SEQ ID NO: 12332 - protein, 17 aa, Artificial Sequence
  Synthetically generated peptide
  VARIANT (1)..(17): Xaa = Any Amino Acid
ACXEXWCAXNXPACTGC

SEQ ID NO: 12333 - protein, 17 aa, Artificial Sequence
  Synthetically generated peptide
  VARIANT (1)..(17): Xaa = Any Amino Acid
ACXEXWCAXNPXACTGC

SEQ ID NO: 12334 - protein, 17 aa, Artificial Sequence
  Synthetically generated peptide
  VARIANT (1)..(17): Xaa = Any Amino Acid
ACXEXWCAXNPAXCTGC

SEQ ID NO: 12335 - protein, 17 aa, Artificial Sequence
  Synthetically generated peptide
  VARIANT (1)..(17): Xaa = Any Amino Acid
ACXEXWCAXNPACXTGC

SEQ ID NO: 12336 - protein, 17 aa, Artificial Sequence
  Synthetically generated peptide
  VARIANT (1)..(17): Xaa = Any Amino Acid
ACXEXWCAXNPACTXGC

SEQ ID NO: 12337 - protein, 17 aa, Artificial Sequence
  Synthetically generated peptide
  VARIANT (1)..(17): Xaa = Any Amino Acid
ACXEXWCAXNPACTGXC

SEQ ID NO: 12338 - protein, 16 aa, Artificial Sequence
  Synthetically generated peptide
  VARIANT (1)..(16): Xaa = Any Amino Acid
ACXEXWCANXPACTGC

SEQ ID NO: 12339 - protein, 17 aa, Artificial Sequence
  Synthetically generated peptide
  VARIANT (1)..(17): Xaa = Any Amino Acid
ACXEXWCANXXPACTGC

SEQ ID NO: 12340 - protein, 17 aa, Artificial Sequence
  Synthetically generated peptide
  VARIANT (1)..(17): Xaa = Any Amino Acid
ACXEXWCANXPXACTGC

SEQ ID NO: 12341 - protein, 17 aa, Artificial Sequence
  Synthetically generated peptide
  VARIANT (1)..(17): Xaa = Any Amino Acid
ACXEXWCANXPAXCTGC

SEQ ID NO: 12342 - protein, 17 aa, Artificial Sequence
  Synthetically generated peptide
  VARIANT (1)..(17): Xaa = Any Amino Acid
ACXEXWCANXPACXTGC

SEQ ID NO: 12343 - protein, 17 aa, Artificial Sequence
  Synthetically generated peptide
  VARIANT (1)..(17): Xaa = Any Amino Acid
ACXEXWCANXPACTXGC

SEQ ID NO: 12344 - protein, 17 aa, Artificial Sequence
  Synthetically generated peptide
  VARIANT (1)..(17): Xaa = Any Amino Acid
ACXEXWCANXPACTGXC

SEQ ID NO: 12345 - protein, 16 aa, Artificial Sequence
  Synthetically generated peptide
  VARIANT (1)..(16): Xaa = Any Amino Acid
ACXEXWCANPXACTGC

SEQ ID NO: 12346 - protein, 17 aa, Artificial Sequence
  Synthetically generated peptide
  VARIANT (1)..(17): Xaa = Any Amino Acid
ACXEXWCANPXXACTGC

SEQ ID NO: 12347 - protein, 17 aa, Artificial Sequence
  Synthetically generated peptide
  VARIANT (1)..(17): Xaa = Any Amino Acid
ACXEXWCANPXAXCTGC

SEQ ID NO: 12348 - protein, 17 aa, Artificial Sequence
  Synthetically generated peptide
  VARIANT (1)..(17): Xaa = Any Amino Acid
ACXEXWCANPXACXTGC

SEQ ID NO: 12349 - protein, 17 aa, Artificial Sequence
  Synthetically generated peptide
  VARIANT (1)..(17): Xaa = Any Amino Acid
ACXEXWCANPXACTXGC

SEQ ID NO: 12350 - protein, 17 aa, Artificial Sequence
  Synthetically generated peptide
  VARIANT (1)..(17): Xaa = Any Amino Acid
ACXEXWCANPXACTGXC

SEQ ID NO: 12351 - protein, 16 aa, Artificial Sequence
  Synthetically generated peptide
  VARIANT (1)..(16): Xaa = Any Amino Acid
ACXEXWCANPAXCTGC

SEQ ID NO: 12352 - protein, 17 aa, Artificial Sequence
  Synthetically generated peptide
  VARIANT (1)..(17): Xaa = Any Amino Acid
ACXEXWCANPAXXCTGC

SEQ ID NO: 12353 - protein, 17 aa, Artificial Sequence
  Synthetically generated peptide
  VARIANT (1)..(17): Xaa = Any Amino Acid
ACXEXWCANPAXCXTGC

SEQ ID NO: 12354 - protein, 17 aa, Artificial Sequence
  Synthetically generated peptide
  VARIANT (1)..(17): Xaa = Any Amino Acid
ACXEXWCANPAXCTXGC

SEQ ID NO: 12355 - protein, 17 aa, Artificial Sequence
  Synthetically generated peptide
  VARIANT (1)..(17): Xaa = Any Amino Acid
ACXEXWCANPAXCTGXC

SEQ ID NO: 12356 - protein, 16 aa, Artificial Sequence
  Synthetically generated peptide
  VARIANT (1)..(16): Xaa = Any Amino Acid
ACXEXWCANPACXTGC

SEQ ID NO: 12357 - protein, 17 aa, Artificial Sequence
  Synthetically generated peptide
  VARIANT (1)..(17): Xaa = Any Amino Acid
ACXEXWCANPACXXTGC

SEQ ID NO: 12358 - protein, 17 aa, Artificial Sequence
  Synthetically generated peptide
  VARIANT (1)..(17): Xaa = Any Amino Acid
ACXEXWCANPACXTXGC

SEQ ID NO: 12359 - protein, 17 aa, Artificial Sequence
  Synthetically generated peptide
  VARIANT (1)..(17): Xaa = Any Amino Acid
ACXEXWCANPACXTGXC

SEQ ID NO: 12360 - protein, 16 aa, Artificial Sequence
  Synthetically generated peptide
  VARIANT (1)..(16): Xaa = Any Amino Acid
ACXEXWCANPACTXGC

SEQ ID NO: 12361 - protein, 17 aa, Artificial Sequence
  Synthetically generated peptide
  VARIANT (1)..(17): Xaa = Any Amino Acid
ACXEXWCANPACTXXGC

SEQ ID NO: 12362 - protein, 17 aa, Artificial Sequence
  Synthetically generated peptide
  VARIANT (1)..(17): Xaa = Any Amino Acid
ACXEXWCANPACTXGXC

SEQ ID NO: 12363 - protein, 16 aa, Artificial Sequence
  Synthetically generated peptide
  VARIANT (1)..(16): Xaa = Any Amino Acid
ACXEXWCANPACTGXC

SEQ ID NO: 12364 - protein, 17 aa, Artificial Sequence
  Synthetically generated peptide
  VARIANT (1)..(17): Xaa = Any Amino Acid
ACXEXWCANPACTGXXC

SEQ ID NO: 12365 - protein, 15 aa, Artificial Sequence
  Synthetically generated peptide
  VARIANT (1)..(15): Xaa = Any Amino Acid
ACXEWXCANPACTGC

SEQ ID NO: 12366 - protein, 16 aa, Artificial Sequence
  Synthetically generated peptide
  VARIANT (1)..(16): Xaa = Any Amino Acid
ACXEWXXCANPACTGC

SEQ ID NO: 12367 - protein, 17 aa, Artificial Sequence
  Synthetically generated peptide
  VARIANT (1)..(17): Xaa = Any Amino Acid
ACXEWXXXCANPACTGC

SEQ ID NO: 12368 - protein, 17 aa, Artificial Sequence
  Synthetically generated peptide
  VARIANT (1)..(17): Xaa = Any Amino Acid
ACXEWXXCAXNPACTGC

SEQ ID NO: 12369 - protein, 17 aa, Artificial Sequence
  Synthetically generated peptide
  VARIANT (1)..(17): Xaa = Any Amino Acid
ACXEWXXCANXPACTGC

SEQ ID NO: 12370 - protein, 17 aa, Artificial Sequence
  Synthetically generated peptide
  VARIANT (1)..(17): Xaa = Any Amino Acid
ACXEWXXCANPXACTGC

SEQ ID NO: 12371 - protein, 17 aa, Artificial Sequence
  Synthetically generated peptide
  VARIANT (1)..(17): Xaa = Any Amino Acid
ACXEWXXCANPAXCTGC

SEQ ID NO: 12372 - protein, 17 aa, Artificial Sequence
  Synthetically generated peptide
  VARIANT (1)..(17): Xaa = Any Amino Acid
ACXEWXXCANPACXTGC

SEQ ID NO: 12373 - protein, 17 aa, Artificial Sequence
  Synthetically generated peptide
  VARIANT (1)..(17): Xaa = Any Amino Acid
ACXEWXXCANPACTXGC

SEQ ID NO: 12374 - protein, 17 aa, Artificial Sequence
  Synthetically generated peptide
  VARIANT (1)..(17): Xaa = Any Amino Acid
ACXEWXXCANPACTGXC

SEQ ID NO: 12375 - protein, 16 aa, Artificial Sequence
  Synthetically generated peptide
  VARIANT (1)..(16): Xaa = Any Amino Acid
ACXEWXCAXNPACTGC

SEQ ID NO: 12376 - protein, 17 aa, Artificial Sequence
  Synthetically generated peptide
  VARIANT (1)..(17): Xaa = Any Amino Acid
ACXEWXCAXXNPACTGC

SEQ ID NO: 12377 - protein, 17 aa, Artificial Sequence
  Synthetically generated peptide
  VARIANT (1)..(17): Xaa = Any Amino Acid
ACXEWXCAXNXPACTGC

SEQ ID NO: 12378 - protein, 17 aa, Artificial Sequence
  Synthetically generated peptide
  VARIANT (1)..(17): Xaa = Any Amino Acid
ACXEWXCAXNPXACTGC

SEQ ID NO: 12379 - protein, 17 aa, Artificial Sequence
  Synthetically generated peptide
  VARIANT (1)..(17): Xaa = Any Amino Acid
ACXEWXCAXNPAXCTGC

SEQ ID NO: 12380 - protein, 17 aa, Artificial Sequence
  Synthetically generated peptide
  VARIANT (1)..(17): Xaa = Any Amino Acid
ACXEWXCAXNPACXTGC

SEQ ID NO: 12381 - protein, 17 aa, Artificial Sequence
  Synthetically generated peptide
  VARIANT (1)..(17): Xaa = Any Amino Acid
ACXEWXCAXNPACTXGC

SEQ ID NO: 12382 - protein, 17 aa, Artificial Sequence
  Synthetically generated peptide
  VARIANT (1)..(17): Xaa = Any Amino Acid
ACXEWXCAXNPACTGXC

SEQ ID NO: 12383 - protein, 16 aa, Artificial Sequence
  Synthetically generated peptide
  VARIANT (1)..(16): Xaa = Any Amino Acid
ACXEWXCANXPACTGC

SEQ ID NO: 12384 - protein, 17 aa, Artificial Sequence
  Synthetically generated peptide
  VARIANT (1)..(17): Xaa = Any Amino Acid
ACXEWXCANXXPACTGC

SEQ ID NO: 12385 - protein, 17 aa, Artificial Sequence
  Synthetically generated peptide
  VARIANT (1)..(17): Xaa = Any Amino Acid
ACXEWXCANXPXACTGC

SEQ ID NO: 12386 - protein, 17 aa, Artificial Sequence
  Synthetically generated peptide
  VARIANT (1)..(17): Xaa = Any Amino Acid
ACXEWXCANXPAXCTGC

SEQ ID NO: 12387 - protein, 17 aa, Artificial Sequence
  Synthetically generated peptide
  VARIANT (1)..(17): Xaa = Any Amino Acid
ACXEWXCANXPACXTGC

SEQ ID NO: 12388 - protein, 17 aa, Artificial Sequence
  Synthetically generated peptide
  VARIANT (1)..(17): Xaa = Any Amino Acid
ACXEWXCANXPACTXGC

SEQ ID NO: 12389 - protein, 17 aa, Artificial Sequence
  Synthetically generated peptide
  VARIANT (1)..(17): Xaa = Any Amino Acid
ACXEWXCANXPACTGXC

SEQ ID NO: 12390 - protein, 16 aa, Artificial Sequence
  Synthetically generated peptide
  VARIANT (1)..(16): Xaa = Any Amino Acid
ACXEWXCANPXACTGC

SEQ ID NO: 12391 - protein, 17 aa, Artificial Sequence
  Synthetically generated peptide
  VARIANT (1)..(17): Xaa = Any Amino Acid
ACXEWXCANPXXACTGC

SEQ ID NO: 12392 - protein, 17 aa, Artificial Sequence
  Synthetically generated peptide
  VARIANT (1)..(17): Xaa = Any Amino Acid
ACXEWXCANPXAXCTGC

SEQ ID NO: 12393 - protein, 17 aa, Artificial Sequence
  Synthetically generated peptide
  VARIANT (1)..(17): Xaa = Any Amino Acid
ACXEWXCANPXACXTGC

SEQ ID NO: 12394 - protein, 17 aa, Artificial Sequence
  Synthetically generated peptide
  VARIANT (1)..(17): Xaa = Any Amino Acid
ACXEWXCANPXACTXGC

SEQ ID NO: 12395 - protein, 17 aa, Artificial Sequence
  Synthetically generated peptide
  VARIANT (1)..(17): Xaa = Any Amino Acid
ACXEWXCANPXACTGXC

SEQ ID NO: 12396 - protein, 16 aa, Artificial Sequence
  Synthetically generated peptide
  VARIANT (1)..(16): Xaa = Any Amino Acid
ACXEWXCANPAXCTGC

SEQ ID NO: 12397 - protein, 17 aa, Artificial Sequence
  Synthetically generated peptide
  VARIANT (1)..(17): Xaa = Any Amino Acid
ACXEWXCANPAXXCTGC

SEQ ID NO: 12398 - protein, 17 aa, Artificial Sequence
  Synthetically generated peptide
  VARIANT (1)..(17): Xaa = Any Amino Acid
ACXEWXCANPAXCXTGC

SEQ ID NO: 12399 - protein, 17 aa, Artificial Sequence
  Synthetically generated peptide
  VARIANT (1)..(17): Xaa = Any Amino Acid
ACXEWXCANPAXCTXGC

SEQ ID NO: 12400 - protein, 17 aa, Artificial Sequence
  Synthetically generated peptide
  VARIANT (1)..(17): Xaa = Any Amino Acid
ACXEWXCANPAXCTGXC

SEQ ID NO: 12401 - protein, 16 aa, Artificial Sequence
  Synthetically generated peptide
  VARIANT (1)..(16): Xaa = Any Amino Acid
ACXEWXCANPACXTGC

SEQ ID NO: 12402 - protein, 17 aa, Artificial Sequence
  Synthetically generated peptide
  VARIANT (1)..(17): Xaa = Any Amino Acid
ACXEWXCANPACXXTGC

SEQ ID NO: 12403 - protein, 17 aa, Artificial Sequence
  Synthetically generated peptide
  VARIANT (1)..(17): Xaa = Any Amino Acid
ACXEWXCANPACXTXGC

SEQ ID NO: 12404 - protein, 17 aa, Artificial Sequence
  Synthetically generated peptide
  VARIANT (1)..(17): Xaa = Any Amino Acid
ACXEWXCANPACXTGXC

SEQ ID NO: 12405 - protein, 16 aa, Artificial Sequence
  Synthetically generated peptide
  VARIANT (1)..(16): Xaa = Any Amino Acid
ACXEWXCANPACTXGC

SEQ ID NO: 12406 - protein, 17 aa, Artificial Sequence
  Synthetically generated peptide
  VARIANT (1)..(17): Xaa = Any Amino Acid
ACXEWXCANPACTXXGC

SEQ ID NO: 12407 - protein, 17 aa, Artificial Sequence
  Synthetically generated peptide
  VARIANT (1)..(17): Xaa = Any Amino Acid
ACXEWXCANPACTXGXC

SEQ ID NO: 12408 - protein, 16 aa, Artificial Sequence
  Synthetically generated peptide
  VARIANT (1)..(16): Xaa = Any Amino Acid
ACXEWXCANPACTGXC

SEQ ID NO: 12409 - protein, 17 aa, Artificial Sequence
  Synthetically generated peptide
  VARIANT (1)..(17): Xaa = Any Amino Acid
ACXEWXCANPACTGXXC

SEQ ID NO: 12410 - protein, 15 aa, Artificial Sequence
  Synthetically generated peptide
  VARIANT (1)..(15): Xaa = Any Amino Acid
ACXEWCAXNPACTGC

SEQ ID NO: 12411 - protein, 16 aa, Artificial Sequence
  Synthetically generated peptide
  VARIANT (1)..(16): Xaa = Any Amino Acid
ACXEWCAXXNPACTGC

SEQ ID NO: 12412 - protein, 17 aa, Artificial Sequence
  Synthetically generated peptide
  VARIANT (1)..(17): Xaa = Any Amino Acid
ACXEWCAXXXNPACTGC

SEQ ID NO: 12413 - protein, 17 aa, Artificial Sequence
  Synthetically generated peptide
  VARIANT (1)..(17): Xaa = Any Amino Acid
ACXEWCAXXNXPACTGC

SEQ ID NO: 12414 - protein, 17 aa, Artificial Sequence
  Synthetically generated peptide
  VARIANT (1)..(17): Xaa = Any Amino Acid
ACXEWCAXXNPXACTGC

SEQ ID NO: 12415 - protein, 17 aa, Artificial Sequence
  Synthetically generated peptide
  VARIANT (1)..(17): Xaa = Any Amino Acid
ACXEWCAXXNPAXCTGC

SEQ ID NO: 12416 - protein, 17 aa, Artificial Sequence
  Synthetically generated peptide
  VARIANT (1)..(17): Xaa = Any Amino Acid
ACXEWCAXXNPACXTGC

SEQ ID NO: 12417 - protein, 17 aa, Artificial Sequence
  Synthetically generated peptide
  VARIANT (1)..(17): Xaa = Any Amino Acid
ACXEWCAXXNPACTXGC

SEQ ID NO: 12418 - protein, 17 aa, Artificial Sequence
  Synthetically generated peptide
  VARIANT (1)..(17): Xaa = Any Amino Acid
ACXEWCAXXNPACTGXC

SEQ ID NO: 12419 - protein, 16 aa, Artificial Sequence
  Synthetically generated peptide
  VARIANT (1)..(16): Xaa = Any Amino Acid
ACXEWCAXNXPACTGC

SEQ ID NO: 12420 - protein, 17 aa, Artificial Sequence
  Synthetically generated peptide
  VARIANT (1)..(17): Xaa = Any Amino Acid
ACXEWCAXNXXPACTGC

SEQ ID NO: 12421 - protein, 17 aa, Artificial Sequence
  Synthetically generated peptide
  VARIANT (1)..(17): Xaa = Any Amino Acid
ACXEWCAXNXPXACTGC

SEQ ID NO: 12422 - protein, 17 aa, Artificial Sequence
  Synthetically generated peptide
  VARIANT (1)..(17): Xaa = Any Amino Acid
ACXEWCAXNXPAXCTGC

SEQ ID NO: 12423 - protein, 17 aa, Artificial Sequence
  Synthetically generated peptide
  VARIANT (1)..(17): Xaa = Any Amino Acid
ACXEWCAXNXPACXTGC

SEQ ID NO: 12424 - protein, 17 aa, Artificial Sequence
  Synthetically generated peptide
  VARIANT (1)..(17): Xaa = Any Amino Acid
ACXEWCAXNXPACTXGC

SEQ ID NO: 12425 - protein, 17 aa, Artificial Sequence
  Synthetically generated peptide
  VARIANT (1)..(17): Xaa = Any Amino Acid
ACXEWCAXNXPACTGXC

SEQ ID NO: 12426 - protein, 16 aa, Artificial Sequence
  Synthetically generated peptide
  VARIANT (1)..(16): Xaa = Any Amino Acid
ACXEWCAXNPXACTGC

SEQ ID NO: 12427 - protein, 17 aa, Artificial Sequence
  Synthetically generated peptide
  VARIANT (1)..(17): Xaa = Any Amino Acid
ACXEWCAXNPXXACTGC

SEQ ID NO: 12428 - protein, 17 aa, Artificial Sequence
  Synthetically generated peptide
  VARIANT (1)..(17): Xaa = Any Amino Acid
ACXEWCAXNPXAXCTGC

SEQ ID NO: 12429 - protein, 17 aa, Artificial Sequence
  Synthetically generated peptide
  VARIANT (1)..(17): Xaa = Any Amino Acid
ACXEWCAXNPXACXTGC

SEQ ID NO: 12430 - protein, 17 aa, Artificial Sequence
  Synthetically generated peptide
  VARIANT (1)..(17): Xaa = Any Amino Acid
ACXEWCAXNPXACTXGC

SEQ ID NO: 12431 - protein, 17 aa, Artificial Sequence
  Synthetically generated peptide
  VARIANT (1)..(17): Xaa = Any Amino Acid
ACXEWCAXNPXACTGXC

SEQ ID NO: 12432 - protein, 16 aa, Artificial Sequence
  Synthetically generated peptide
  VARIANT (1)..(16): Xaa = Any Amino Acid
ACXEWCAXNPAXCTGC

SEQ ID NO: 12433 - protein, 17 aa, Artificial Sequence
  Synthetically generated peptide
  VARIANT (1)..(17): Xaa = Any Amino Acid
ACXEWCAXNPAXXCTGC

SEQ ID NO: 12434 - protein, 17 aa, Artificial Sequence
  Synthetically generated peptide
  VARIANT (1)..(17): Xaa = Any Amino Acid
ACXEWCAXNPAXCXTGC

SEQ ID NO: 12435 - protein, 17 aa, Artificial Sequence
  Synthetically generated peptide
  VARIANT (1)..(17): Xaa = Any Amino Acid
ACXEWCAXNPAXCTXGC

SEQ ID NO: 12436 - protein, 17 aa, Artificial Sequence
  Synthetically generated peptide
  VARIANT (1)..(17): Xaa = Any Amino Acid
ACXEWCAXNPAXCTGXC

SEQ ID NO: 12437 - protein, 16 aa, Artificial Sequence
  Synthetically generated peptide
  VARIANT (1)..(16): Xaa = Any Amino Acid
ACXEWCAXNPACXTGC

SEQ ID NO: 12438 - protein, 17 aa, Artificial Sequence
  Synthetically generated peptide
  VARIANT (1)..(17): Xaa = Any Amino Acid
ACXEWCAXNPACXXTGC

SEQ ID NO: 12439 - protein, 17 aa, Artificial Sequence
  Synthetically generated peptide
  VARIANT (1)..(17): Xaa = Any Amino Acid
ACXEWCAXNPACXTXGC

SEQ ID NO: 12440 - protein, 17 aa, Artificial Sequence
  Synthetically generated peptide
  VARIANT (1)..(17): Xaa = Any Amino Acid
ACXEWCAXNPACXTGXC

SEQ ID NO: 12441 - protein, 16 aa, Artificial Sequence
  Synthetically generated peptide
  VARIANT (1)..(16): Xaa = Any Amino Acid
ACXEWCAXNPACTXGC

SEQ ID NO: 12442 - protein, 17 aa, Artificial Sequence
  Synthetically generated peptide
  VARIANT (1)..(17): Xaa = Any Amino Acid
ACXEWCAXNPACTXXGC

SEQ ID NO: 12443 - protein, 17 aa, Artificial Sequence
  Synthetically generated peptide
  VARIANT (1)..(17): Xaa = Any Amino Acid
ACXEWCAXNPACTXGXC

SEQ ID NO: 12444 - protein, 16 aa, Artificial Sequence
  Synthetically generated peptide
  VARIANT (1)..(16): Xaa = Any Amino Acid
ACXEWCAXNPACTGXC

SEQ ID NO: 12445 - protein, 17 aa, Artificial Sequence
  Synthetically generated peptide
  VARIANT (1)..(17): Xaa = Any Amino Acid
ACXEWCAXNPACTGXXC

SEQ ID NO: 12446 - protein, 15 aa, Artificial Sequence
  Synthetically generated peptide
  VARIANT (1)..(15): Xaa = Any Amino Acid
ACXEWCANXPACTGC

SEQ ID NO: 12447 - protein, 16 aa, Artificial Sequence
  Synthetically generated peptide
  VARIANT (1)..(16): Xaa = Any Amino Acid
ACXEWCANXXPACTGC

SEQ ID NO: 12448 - protein, 17 aa, Artificial Sequence
  Synthetically generated peptide
  VARIANT (1)..(17): Xaa = Any Amino Acid
ACXEWCANXXXPACTGC

SEQ ID NO: 12449 - protein, 17 aa, Artificial Sequence
  Synthetically generated peptide
  VARIANT (1)..(17): Xaa = Any Amino Acid
ACXEWCANXXPXACTGC

SEQ ID NO: 12450 - protein, 17 aa, Artificial Sequence
  Synthetically generated peptide
  VARIANT (1)..(17): Xaa = Any Amino Acid
ACXEWCANXXPAXCTGC

SEQ ID NO: 12451 - protein, 17 aa, Artificial Sequence
  Synthetically generated peptide
  VARIANT (1)..(17): Xaa = Any Amino Acid
ACXEWCANXXPACXTGC

SEQ ID NO: 12452 - protein, 17 aa, Artificial Sequence
  Synthetically generated peptide
  VARIANT (1)..(17): Xaa = Any Amino Acid
ACXEWCANXXPACTXGC

SEQ ID NO: 12453 - protein, 17 aa, Artificial Sequence
  Synthetically generated peptide
  VARIANT (1)..(17): Xaa = Any Amino Acid
ACXEWCANXXPACTGXC

SEQ ID NO: 12454 - protein, 16 aa, Artificial Sequence
  Synthetically generated peptide
  VARIANT (1)..(16): Xaa = Any Amino Acid
ACXEWCANXPXACTGC

SEQ ID NO: 12455 - protein, 17 aa, Artificial Sequence
  Synthetically generated peptide
  VARIANT (1)..(17): Xaa = Any Amino Acid
ACXEWCANXPXXACTGC

SEQ ID NO: 12456 - protein, 17 aa, Artificial Sequence
  Synthetically generated peptide
  VARIANT (1)..(17): Xaa = Any Amino Acid
ACXEWCANXPXAXCTGC

SEQ ID NO: 12457 - protein, 17 aa, Artificial Sequence
  Synthetically generated peptide
  VARIANT (1)..(17): Xaa = Any Amino Acid
ACXEWCANXPXACXTGC

SEQ ID NO: 12458 - protein, 17 aa, Artificial Sequence
  Synthetically generated peptide
  VARIANT (1)..(17): Xaa = Any Amino Acid
ACXEWCANXPXACTXGC

SEQ ID NO: 12459 - protein, 17 aa, Artificial Sequence
  Synthetically generated peptide
  VARIANT (1)..(17): Xaa = Any Amino Acid
ACXEWCANXPXACTGXC

SEQ ID NO: 12460 - protein, 16 aa, Artificial Sequence
  Synthetically generated peptide
  VARIANT (1)..(16): Xaa = Any Amino Acid
ACXEWCANXPAXCTGC

SEQ ID NO: 12461 - protein, 17 aa, Artificial Sequence
  Synthetically generated peptide
  VARIANT (1)..(17): Xaa = Any Amino Acid
ACXEWCANXPAXXCTGC

SEQ ID NO: 12462 - protein, 17 aa, Artificial Sequence
  Synthetically generated peptide
  VARIANT (1)..(17): Xaa = Any Amino Acid
ACXEWCANXPAXCXTGC

SEQ ID NO: 12463 - protein, 17 aa, Artificial Sequence
  Synthetically generated peptide
  VARIANT (1)..(17): Xaa = Any Amino Acid
ACXEWCANXPAXCTXGC

SEQ ID NO: 12464 - protein, 17 aa, Artificial Sequence
  Synthetically generated peptide
  VARIANT (1)..(17): Xaa = Any Amino Acid
ACXEWCANXPAXCTGXC

SEQ ID NO: 12465 - protein, 16 aa, Artificial Sequence
  Synthetically generated peptide
  VARIANT (1)..(16): Xaa = Any Amino Acid
ACXEWCANXPACXTGC

SEQ ID NO: 12466 - protein, 17 aa, Artificial Sequence
  Synthetically generated peptide
  VARIANT (1)..(17): Xaa = Any Amino Acid
ACXEWCANXPACXXTGC

SEQ ID NO: 12467 - protein, 17 aa, Artificial Sequence
  Synthetically generated peptide
  VARIANT (1)..(17): Xaa = Any Amino Acid
ACXEWCANXPACXTXGC

SEQ ID NO: 12468 - protein, 17 aa, Artificial Sequence
  Synthetically generated peptide
  VARIANT (1)..(17): Xaa = Any Amino Acid
ACXEWCANXPACXTGXC

SEQ ID NO: 12469 - protein, 16 aa, Artificial Sequence
  Synthetically generated peptide
  VARIANT (1)..(16): Xaa = Any Amino Acid
ACXEWCANXPACTXGC

SEQ ID NO: 12470 - protein, 17 aa, Artificial Sequence
  Synthetically generated peptide
  VARIANT (1)..(17): Xaa = Any Amino Acid
ACXEWCANXPACTXXGC

SEQ ID NO: 12471 - protein, 17 aa, Artificial Sequence
  Synthetically generated peptide
  VARIANT (1)..(17): Xaa = Any Amino Acid
ACXEWCANXPACTXGXC

SEQ ID NO: 12472 - protein, 16 aa, Artificial Sequence
  Synthetically generated peptide
  VARIANT (1)..(16): Xaa = Any Amino Acid
ACXEWCANXPACTGXC

SEQ ID NO: 12473 - protein, 17 aa, Artificial Sequence
  Synthetically generated peptide
  VARIANT (1)..(17): Xaa = Any Amino Acid
ACXEWCANXPACTGXXC

SEQ ID NO: 12474 - protein, 15 aa, Artificial Sequence
  Synthetically generated peptide
  VARIANT (1)..(15): Xaa = Any Amino Acid
ACXEWCANPXACTGC

SEQ ID NO: 12475 - protein, 16 aa, Artificial Sequence
  Synthetically generated peptide
  VARIANT (1)..(16): Xaa = Any Amino Acid
ACXEWCANPXXACTGC

SEQ ID NO: 12476 - protein, 17 aa, Artificial Sequence
  Synthetically generated peptide
  VARIANT (1)..(17): Xaa = Any Amino Acid
ACXEWCANPXXXACTGC

SEQ ID NO: 12477 - protein, 17 aa, Artificial Sequence
  Synthetically generated peptide
  VARIANT (1)..(17): Xaa = Any Amino Acid
ACXEWCANPXXAXCTGC

SEQ ID NO: 12478 - protein, 17 aa, Artificial Sequence
  Synthetically generated peptide
  VARIANT (1)..(17): Xaa = Any Amino Acid
ACXEWCANPXXACXTGC

SEQ ID NO: 12479 - protein, 17 aa, Artificial Sequence
  Synthetically generated peptide
  VARIANT (1)..(17): Xaa = Any Amino Acid
ACXEWCANPXXACTXGC

SEQ ID NO: 12480 - protein, 17 aa, Artificial Sequence
  Synthetically generated peptide
  VARIANT (1)..(17): Xaa = Any Amino Acid
ACXEWCANPXXACTGXC

SEQ ID NO: 12481 - protein, 16 aa, Artificial Sequence
  Synthetically generated peptide
  VARIANT (1)..(16): Xaa = Any Amino Acid
ACXEWCANPXAXCTGC

SEQ ID NO: 12482 - protein, 17 aa, Artificial Sequence
  Synthetically generated peptide
  VARIANT (1)..(17): Xaa = Any Amino Acid
ACXEWCANPXAXXCTGC

SEQ ID NO: 12483 - protein, 17 aa, Artificial Sequence
  Synthetically generated peptide
  VARIANT (1)..(17): Xaa = Any Amino Acid
ACXEWCANPXAXCXTGC

SEQ ID NO: 12484 - protein, 17 aa, Artificial Sequence
  Synthetically generated peptide
  VARIANT (1)..(17): Xaa = Any Amino Acid
ACXEWCANPXAXCTXGC

SEQ ID NO: 12485 - protein, 17 aa, Artificial Sequence
  Synthetically generated peptide
  VARIANT (1)..(17): Xaa = Any Amino Acid
ACXEWCANPXAXCTGXC

SEQ ID NO: 12486 - protein, 16 aa, Artificial Sequence
  Synthetically generated peptide
  VARIANT (1)..(16): Xaa = Any Amino Acid
ACXEWCANPXACXTGC

SEQ ID NO: 12487 - protein, 17 aa, Artificial Sequence
  Synthetically generated peptide
  VARIANT (1)..(17): Xaa = Any Amino Acid
ACXEWCANPXACXXTGC

SEQ ID NO: 12488 - protein, 17 aa, Artificial Sequence
  Synthetically generated peptide
  VARIANT (1)..(17): Xaa = Any Amino Acid
ACXEWCANPXACXTXGC

SEQ ID NO: 12489 - protein, 17 aa, Artificial Sequence
  Synthetically generated peptide
  VARIANT (1)..(17): Xaa = Any Amino Acid
ACXEWCANPXACXTGXC

SEQ ID NO: 12490 - protein, 16 aa, Artificial Sequence
  Synthetically generated peptide
  VARIANT (1)..(16): Xaa = Any Amino Acid
ACXEWCANPXACTXGC

SEQ ID NO: 12491 - protein, 17 aa, Artificial Sequence
  Synthetically generated peptide
  VARIANT (1)..(17): Xaa = Any Amino Acid
ACXEWCANPXACTXXGC

SEQ ID NO: 12492 - protein, 17 aa, Artificial Sequence
  Synthetically generated peptide
  VARIANT (1)..(17): Xaa = Any Amino Acid
ACXEWCANPXACTXGXC

SEQ ID NO: 12493 - protein, 16 aa, Artificial Sequence
  Synthetically generated peptide
  VARIANT (1)..(16): Xaa = Any Amino Acid
ACXEWCANPXACTGXC

SEQ ID NO: 12494 - protein, 17 aa, Artificial Sequence
  Synthetically generated peptide
  VARIANT (1)..(17): Xaa = Any Amino Acid
ACXEWCANPXACTGXXC

SEQ ID NO: 12495 - protein, 15 aa, Artificial Sequence
  Synthetically generated peptide
  VARIANT (1)..(15): Xaa = Any Amino Acid
ACXEWCANPAXCTGC

SEQ ID NO: 12496 - protein, 16 aa, Artificial Sequence
  Synthetically generated peptide
  VARIANT (1)..(16): Xaa = Any Amino Acid
ACXEWCANPAXXCTGC

SEQ ID NO: 12497 - protein, 17 aa, Artificial Sequence
  Synthetically generated peptide
  VARIANT (1)..(17): Xaa = Any Amino Acid
ACXEWCANPAXXXCTGC

SEQ ID NO: 12498 - protein, 17 aa, Artificial Sequence
  Synthetically generated peptide
  VARIANT (1)..(17): Xaa = Any Amino Acid
ACXEWCANPAXXCXTGC

SEQ ID NO: 12499 - protein, 17 aa, Artificial Sequence
  Synthetically generated peptide
  VARIANT (1)..(17): Xaa = Any Amino Acid
ACXEWCANPAXXCTXGC

SEQ ID NO: 12500 - protein, 17 aa, Artificial Sequence
  Synthetically generated peptide
  VARIANT (1)..(17): Xaa = Any Amino Acid
ACXEWCANPAXXCTGXC

SEQ ID NO: 12501 - protein, 16 aa, Artificial Sequence
  Synthetically generated peptide
  VARIANT (1)..(16): Xaa = Any Amino Acid
ACXEWCANPAXCXTGC

SEQ ID NO: 12502 - protein, 17 aa, Artificial Sequence
  Synthetically generated peptide
  VARIANT (1)..(17): Xaa = Any Amino Acid
ACXEWCANPAXCXXTGC

SEQ ID NO: 12503 - protein, 17 aa, Artificial Sequence
  Synthetically generated peptide
  VARIANT (1)..(17): Xaa = Any Amino Acid
ACXEWCANPAXCXTXGC

SEQ ID NO: 12504 - protein, 17 aa, Artificial Sequence
  Synthetically generated peptide
  VARIANT (1)..(17): Xaa = Any Amino Acid
ACXEWCANPAXCXTGXC

SEQ ID NO: 12505 - protein, 16 aa, Artificial Sequence
  Synthetically generated peptide
  VARIANT (1)..(16): Xaa = Any Amino Acid
ACXEWCANPAXCTXGC

SEQ ID NO: 12506 - protein, 17 aa, Artificial Sequence
  Synthetically generated peptide
  VARIANT (1)..(17): Xaa = Any Amino Acid
ACXEWCANPAXCTXXGC

SEQ ID NO: 12507 - protein, 17 aa, Artificial Sequence
  Synthetically generated peptide
  VARIANT (1)..(17): Xaa = Any Amino Acid
ACXEWCANPAXCTXGXC

SEQ ID NO: 12508 - protein, 16 aa, Artificial Sequence
  Synthetically generated peptide
  VARIANT (1)..(16): Xaa = Any Amino Acid
ACXEWCANPAXCTGXC

SEQ ID NO: 12509 - protein, 17 aa, Artificial Sequence
  Synthetically generated peptide
  VARIANT (1)..(17): Xaa = Any Amino Acid
ACXEWCANPAXCTGXXC

SEQ ID NO: 12510 - protein, 15 aa, Artificial Sequence
  Synthetically generated peptide
  VARIANT (1)..(15): Xaa = Any Amino Acid
ACXEWCANPACXTGC

SEQ ID NO: 12511 - protein, 16 aa, Artificial Sequence
  Synthetically generated peptide
  VARIANT (1)..(16): Xaa = Any Amino Acid
ACXEWCANPACXXTGC

SEQ ID NO: 12512 - protein, 17 aa, Artificial Sequence
  Synthetically generated peptide
  VARIANT (1)..(17): Xaa = Any Amino Acid
ACXEWCANPACXXXTGC

SEQ ID NO: 12513 - protein, 17 aa, Artificial Sequence
  Synthetically generated peptide
  VARIANT (1)..(17): Xaa = Any Amino Acid
ACXEWCANPACXXTXGC

SEQ ID NO: 12514 - protein, 17 aa, Artificial Sequence
  Synthetically generated peptide
  VARIANT (1)..(17): Xaa = Any Amino Acid
ACXEWCANPACXXTGXC

SEQ ID NO: 12515 - protein, 16 aa, Artificial Sequence
  Synthetically generated peptide
  VARIANT (1)..(16): Xaa = Any Amino Acid
ACXEWCANPACXTXGC

SEQ ID NO: 12516 - protein, 17 aa, Artificial Sequence
  Synthetically generated peptide
  VARIANT (1)..(17): Xaa = Any Amino Acid
ACXEWCANPACXTXXGC

SEQ ID NO: 12517 - protein, 17 aa, Artificial Sequence
  Synthetically generated peptide
  VARIANT (1)..(17): Xaa = Any Amino Acid
ACXEWCANPACXTXGXC

SEQ ID NO: 12518 - protein, 16 aa, Artificial Sequence
  Synthetically generated peptide
  VARIANT (1)..(16): Xaa = Any Amino Acid
ACXEWCANPACXTGXC

SEQ ID NO: 12519 - protein, 17 aa, Artificial Sequence
  Synthetically generated peptide
  VARIANT (1)..(17): Xaa = Any Amino Acid
ACXEWCANPACXTGXXC

SEQ ID NO: 12520 - protein, 15 aa, Artificial Sequence
  Synthetically generated peptide
  VARIANT (1)..(15): Xaa = Any Amino Acid
ACXEWCANPACTXGC

SEQ ID NO: 12521 - protein, 16 aa, Artificial Sequence
  Synthetically generated peptide
  VARIANT (1)..(16): Xaa = Any Amino Acid
ACXEWCANPACTXXGC

SEQ ID NO: 12522 - protein, 17 aa, Artificial Sequence
  Synthetically generated peptide
  VARIANT (1)..(17): Xaa = Any Amino Acid
ACXEWCANPACTXXXGC

SEQ ID NO: 12523 - protein, 17 aa, Artificial Sequence
  Synthetically generated peptide
  VARIANT (1)..(17): Xaa = Any Amino Acid
ACXEWCANPACTXXGXC

SEQ ID NO: 12524 - protein, 16 aa, Artificial Sequence
  Synthetically generated peptide
  VARIANT (1)..(16): Xaa = Any Amino Acid
ACXEWCANPACTXGXC

SEQ ID NO: 12525 - protein, 17 aa, Artificial Sequence
  Synthetically generated peptide
  VARIANT (1)..(17): Xaa = Any Amino Acid
ACXEWCANPACTXGXXC

SEQ ID NO: 12526 - protein, 15 aa, Artificial Sequence
  Synthetically generated peptide
  VARIANT (1)..(15): Xaa = Any Amino Acid
ACXEWCANPACTGXC

SEQ ID NO: 12527 - protein, 16 aa, Artificial Sequence
  Synthetically generated peptide
  VARIANT (1)..(16): Xaa = Any Amino Acid
ACXEWCANPACTGXXC

SEQ ID NO: 12528 - protein, 17 aa, Artificial Sequence
  Synthetically generated peptide
  VARIANT (1)..(17): Xaa = Any Amino Acid
ACXEWCANPACTGXXXC

SEQ ID NO: 12529 - protein, 14 aa, Artificial Sequence
  Synthetically generated peptide
  VARIANT (1)..(14): Xaa = Any Amino Acid
ACEXWCANPACTGC

SEQ ID NO: 12530 - protein, 15 aa, Artificial Sequence
  Synthetically generated peptide
  VARIANT (1)..(15): Xaa = Any Amino Acid
ACEXXWCANPACTGC

SEQ ID NO: 12531 - protein, 16 aa, Artificial Sequence
  Synthetically generated peptide
  VARIANT (1)..(16): Xaa = Any Amino Acid
ACEXXXWCANPACTGC

SEQ ID NO: 12532 - protein, 17 aa, Artificial Sequence
  Synthetically generated peptide
  VARIANT (1)..(17): Xaa = Any Amino Acid
ACEXXXXWCANPACTGC

SEQ ID NO: 12533 - protein, 17 aa, Artificial Sequence
  Synthetically generated peptide
  VARIANT (1)..(17): Xaa = Any Amino Acid
ACEXXXWXCANPACTGC

SEQ ID NO: 12534 - protein, 17 aa, Artificial Sequence
  Synthetically generated peptide
  VARIANT (1)..(17): Xaa = Any Amino Acid
ACEXXXWCAXNPACTGC

SEQ ID NO: 12535 - protein, 17 aa, Artificial Sequence
  Synthetically generated peptide
  VARIANT (1)..(17): Xaa = Any Amino Acid
ACEXXXWCANXPACTGC

SEQ ID NO: 12536 - protein, 17 aa, Artificial Sequence
  Synthetically generated peptide
  VARIANT (1)..(17): Xaa = Any Amino Acid
ACEXXXWCANPXACTGC

SEQ ID NO: 12537 - protein, 17 aa, Artificial Sequence
  Synthetically generated peptide
  VARIANT (1)..(17): Xaa = Any Amino Acid
ACEXXXWCANPAXCTGC

SEQ ID NO: 12538 - protein, 17 aa, Artificial Sequence
  Synthetically generated peptide
  VARIANT (1)..(17): Xaa = Any Amino Acid
ACEXXXWCANPACXTGC

SEQ ID NO: 12539 - protein, 17 aa, Artificial Sequence
  Synthetically generated peptide
  VARIANT (1)..(17): Xaa = Any Amino Acid
ACEXXXWCANPACTXGC

SEQ ID NO: 12540 - protein, 17 aa, Artificial Sequence
  Synthetically generated peptide
  VARIANT (1)..(17): Xaa = Any Amino Acid
ACEXXXWCANPACTGXC

SEQ ID NO: 12541 - protein, 16 aa, Artificial Sequence
  Synthetically generated peptide
  VARIANT (1)..(16): Xaa = Any Amino Acid
ACEXXWXCANPACTGC

SEQ ID NO: 12542 - protein, 17 aa, Artificial Sequence
  Synthetically generated peptide
  VARIANT (1)..(17): Xaa = Any Amino Acid
ACEXXWXXCANPACTGC

SEQ ID NO: 12543 - protein, 17 aa, Artificial Sequence
  Synthetically generated peptide
  VARIANT (1)..(17): Xaa = Any Amino Acid
ACEXXWXCAXNPACTGC

SEQ ID NO: 12544 - protein, 17 aa, Artificial Sequence
  Synthetically generated peptide
  VARIANT (1)..(17): Xaa = Any Amino Acid
ACEXXWXCANXPACTGC

SEQ ID NO: 12545 - protein, 17 aa, Artificial Sequence
  Synthetically generated peptide
  VARIANT (1)..(17): Xaa = Any Amino Acid
ACEXXWXCANPXACTGC

SEQ ID NO: 12546 - protein, 17 aa, Artificial Sequence
  Synthetically generated peptide
  VARIANT (1)..(17): Xaa = Any Amino Acid
ACEXXWXCANPAXCTGC

SEQ ID NO: 12547 - protein, 17 aa, Artificial Sequence
  Synthetically generated peptide
  VARIANT (1)..(17): Xaa = Any Amino Acid
ACEXXWXCANPACXTGC

SEQ ID NO: 12548 - protein, 17 aa, Artificial Sequence
  Synthetically generated peptide
  VARIANT (1)..(17): Xaa = Any Amino Acid
ACEXXWXCANPACTXGC

SEQ ID NO: 12549 - protein, 17 aa, Artificial Sequence
  Synthetically generated peptide
  VARIANT (1)..(17): Xaa = Any Amino Acid
ACEXXWXCANPACTGXC

SEQ ID NO: 12550 - protein, 16 aa, Artificial Sequence
  Synthetically generated peptide
  VARIANT (1)..(16): Xaa = Any Amino Acid
ACEXXWCAXNPACTGC

SEQ ID NO: 12551 - protein, 17 aa, Artificial Sequence
  Synthetically generated peptide
  VARIANT (1)..(17): Xaa = Any Amino Acid
ACEXXWCAXXNPACTGC

SEQ ID NO: 12552 - protein, 17 aa, Artificial Sequence
  Synthetically generated peptide
  VARIANT (1)..(17): Xaa = Any Amino Acid
ACEXXWCAXNXPACTGC

SEQ ID NO: 12553 - protein, 17 aa, Artificial Sequence
  Synthetically generated peptide
  VARIANT (1)..(17): Xaa = Any Amino Acid
ACEXXWCAXNPXACTGC

SEQ ID NO: 12554 - protein, 17 aa, Artificial Sequence
  Synthetically generated peptide
  VARIANT (1)..(17): Xaa = Any Amino Acid
ACEXXWCAXNPAXCTGC

SEQ ID NO: 12555 - protein, 17 aa, Artificial Sequence
  Synthetically generated peptide
  VARIANT (1)..(17): Xaa = Any Amino Acid
ACEXXWCAXNPACXTGC

SEQ ID NO: 12556 - protein, 17 aa, Artificial Sequence
  Synthetically generated peptide
  VARIANT (1)..(17): Xaa = Any Amino Acid
ACEXXWCAXNPACTXGC

SEQ ID NO: 12557 - protein, 17 aa, Artificial Sequence
  Synthetically generated peptide
  VARIANT (1)..(17): Xaa = Any Amino Acid
ACEXXWCAXNPACTGXC

SEQ ID NO: 12558 - protein, 16 aa, Artificial Sequence
  Synthetically generated peptide
  VARIANT (1)..(16): Xaa = Any Amino Acid
ACEXXWCANXPACTGC

SEQ ID NO: 12559 - protein, 17 aa, Artificial Sequence
  Synthetically generated peptide
  VARIANT (1)..(17): Xaa = Any Amino Acid
ACEXXWCANXXPACTGC

SEQ ID NO: 12560 - protein, 17 aa, Artificial Sequence
  Synthetically generated peptide
  VARIANT (1)..(17): Xaa = Any Amino Acid
ACEXXWCANXPXACTGC

SEQ ID NO: 12561 - protein, 17 aa, Artificial Sequence
  Synthetically generated peptide
  VARIANT (1)..(17): Xaa = Any Amino Acid
ACEXXWCANXPAXCTGC

SEQ ID NO: 12562 - protein, 17 aa, Artificial Sequence
  Synthetically generated peptide
  VARIANT (1)..(17): Xaa = Any Amino Acid
ACEXXWCANXPACXTGC

SEQ ID NO: 12563 - protein, 17 aa, Artificial Sequence
  Synthetically generated peptide
  VARIANT (1)..(17): Xaa = Any Amino Acid
ACEXXWCANXPACTXGC

SEQ ID NO: 12564 - protein, 17 aa, Artificial Sequence
  Synthetically generated peptide
  VARIANT (1)..(17): Xaa = Any Amino Acid
ACEXXWCANXPACTGXC

SEQ ID NO: 12565 - protein, 16 aa, Artificial Sequence
  Synthetically generated peptide
  VARIANT (1)..(16): Xaa = Any Amino Acid
ACEXXWCANPXACTGC

SEQ ID NO: 12566 - protein, 17 aa, Artificial Sequence
  Synthetically generated peptide
  VARIANT (1)..(17): Xaa = Any Amino Acid
ACEXXWCANPXXACTGC

SEQ ID NO: 12567 - protein, 17 aa, Artificial Sequence
  Synthetically generated peptide
  VARIANT (1)..(17): Xaa = Any Amino Acid
ACEXXWCANPXAXCTGC

SEQ ID NO: 12568 - protein, 17 aa, Artificial Sequence
  Synthetically generated peptide
  VARIANT (1)..(17): Xaa = Any Amino Acid
ACEXXWCANPXACXTGC

SEQ ID NO: 12569 - protein, 17 aa, Artificial Sequence
  Synthetically generated peptide
  VARIANT (1)..(17): Xaa = Any Amino Acid
ACEXXWCANPXACTXGC

SEQ ID NO: 12570 - protein, 17 aa, Artificial Sequence
  Synthetically generated peptide
  VARIANT (1)..(17): Xaa = Any Amino Acid
ACEXXWCANPXACTGXC

SEQ ID NO: 12571 - protein, 16 aa, Artificial Sequence
  Synthetically generated peptide
  VARIANT (1)..(16): Xaa = Any Amino Acid
ACEXXWCANPAXCTGC

SEQ ID NO: 12572 - protein, 17 aa, Artificial Sequence
  Synthetically generated peptide
  VARIANT (1)..(17): Xaa = Any Amino Acid
ACEXXWCANPAXXCTGC

SEQ ID NO: 12573 - protein, 17 aa, Artificial Sequence
  Synthetically generated peptide
  VARIANT (1)..(17): Xaa = Any Amino Acid
ACEXXWCANPAXCXTGC

SEQ ID NO: 12574 - protein, 17 aa, Artificial Sequence
  Synthetically generated peptide
  VARIANT (1)..(17): Xaa = Any Amino Acid
ACEXXWCANPAXCTXGC

SEQ ID NO: 12575 - protein, 17 aa, Artificial Sequence
  Synthetically generated peptide
  VARIANT (1)..(17): Xaa = Any Amino Acid
ACEXXWCANPAXCTGXC

SEQ ID NO: 12576 - protein, 16 aa, Artificial Sequence
  Synthetically generated peptide
  VARIANT (1)..(16): Xaa = Any Amino Acid
ACEXXWCANPACXTGC

SEQ ID NO: 12577 - protein, 17 aa, Artificial Sequence
  Synthetically generated peptide
  VARIANT (1)..(17): Xaa = Any Amino Acid
ACEXXWCANPACXXTGC

SEQ ID NO: 12578 - protein, 17 aa, Artificial Sequence
  Synthetically generated peptide
  VARIANT (1)..(17): Xaa = Any Amino Acid
ACEXXWCANPACXTXGC

SEQ ID NO: 12579 - protein, 17 aa, Artificial Sequence
  Synthetically generated peptide
  VARIANT (1)..(17): Xaa = Any Amino Acid
ACEXXWCANPACXTGXC

SEQ ID NO: 12580 - protein, 16 aa, Artificial Sequence
  Synthetically generated peptide
  VARIANT (1)..(16): Xaa = Any Amino Acid
ACEXXWCANPACTXGC

SEQ ID NO: 12581 - protein, 17 aa, Artificial Sequence
  Synthetically generated peptide
  VARIANT (1)..(17): Xaa = Any Amino Acid
ACEXXWCANPACTXXGC

SEQ ID NO: 12582 - protein, 17 aa, Artificial Sequence
  Synthetically generated peptide
  VARIANT (1)..(17): Xaa = Any Amino Acid
ACEXXWCANPACTXGXC

SEQ ID NO: 12583 - protein, 16 aa, Artificial Sequence
  Synthetically generated peptide
  VARIANT (1)..(16): Xaa = Any Amino Acid
ACEXXWCANPACTGXC

SEQ ID NO: 12584 - protein, 17 aa, Artificial Sequence
  Synthetically generated peptide
  VARIANT (1)..(17): Xaa = Any Amino Acid
ACEXXWCANPACTGXXC

SEQ ID NO: 12585 - protein, 15 aa, Artificial Sequence
  Synthetically generated peptide
  VARIANT (1)..(15): Xaa = Any Amino Acid
ACEXWXCANPACTGC

SEQ ID NO: 12586 - protein, 16 aa, Artificial Sequence
  Synthetically generated peptide
  VARIANT (1)..(16): Xaa = Any Amino Acid
ACEXWXXCANPACTGC

SEQ ID NO: 12587 - protein, 17 aa, Artificial Sequence
  Synthetically generated peptide
  VARIANT (1)..(17): Xaa = Any Amino Acid
ACEXWXXXCANPACTGC

SEQ ID NO: 12588 - protein, 17 aa, Artificial Sequence
  Synthetically generated peptide
  VARIANT (1)..(17): Xaa = Any Amino Acid
ACEXWXXCAXNPACTGC

SEQ ID NO: 12589 - protein, 17 aa, Artificial Sequence
  Synthetically generated peptide
  VARIANT (1)..(17): Xaa = Any Amino Acid
ACEXWXXCANXPACTGC

SEQ ID NO: 12590 - protein, 17 aa, Artificial Sequence
  Synthetically generated peptide
  VARIANT (1)..(17): Xaa = Any Amino Acid
ACEXWXXCANPXACTGC

SEQ ID NO: 12591 - protein, 17 aa, Artificial Sequence
  Synthetically generated peptide
  VARIANT (1)..(17): Xaa = Any Amino Acid
ACEXWXXCANPAXCTGC

SEQ ID NO: 12592 - protein, 17 aa, Artificial Sequence
  Synthetically generated peptide
  VARIANT (1)..(17): Xaa = Any Amino Acid
ACEXWXXCANPACXTGC

SEQ ID NO: 12593 - protein, 17 aa, Artificial Sequence
  Synthetically generated peptide
  VARIANT (1)..(17): Xaa = Any Amino Acid
ACEXWXXCANPACTXGC

SEQ ID NO: 12594 - protein, 17 aa, Artificial Sequence
  Synthetically generated peptide
  VARIANT (1)..(17): Xaa = Any Amino Acid
ACEXWXXCANPACTGXC

SEQ ID NO: 12595 - protein, 16 aa, Artificial Sequence
  Synthetically generated peptide
  VARIANT (1)..(16): Xaa = Any Amino Acid
ACEXWXCAXNPACTGC

SEQ ID NO: 12596 - protein, 17 aa, Artificial Sequence
  Synthetically generated peptide
  VARIANT (1)..(17): Xaa = Any Amino Acid
ACEXWXCAXXNPACTGC

SEQ ID NO: 12597 - protein, 17 aa, Artificial Sequence
  Synthetically generated peptide
  VARIANT (1)..(17): Xaa = Any Amino Acid
ACEXWXCAXNXPACTGC

SEQ ID NO: 12598 - protein, 17 aa, Artificial Sequence
  Synthetically generated peptide
  VARIANT (1)..(17): Xaa = Any Amino Acid
ACEXWXCAXNPXACTGC

SEQ ID NO: 12599 - protein, 17 aa, Artificial Sequence
  Synthetically generated peptide
  VARIANT (1)..(17): Xaa = Any Amino Acid
ACEXWXCAXNPAXCTGC

SEQ ID NO: 12600 - protein, 17 aa, Artificial Sequence
  Synthetically generated peptide
  VARIANT (1)..(17): Xaa = Any Amino Acid
ACEXWXCAXNPACXTGC

SEQ ID NO: 12601 - protein, 17 aa, Artificial Sequence
  Synthetically generated peptide
  VARIANT (1)..(17): Xaa = Any Amino Acid
ACEXWXCAXNPACTXGC

SEQ ID NO: 12602 - protein, 17 aa, Artificial Sequence
  Synthetically generated peptide
  VARIANT (1)..(17): Xaa = Any Amino Acid
ACEXWXCAXNPACTGXC

SEQ ID NO: 12603 - protein, 16 aa, Artificial Sequence
  Synthetically generated peptide
  VARIANT (1)..(16): Xaa = Any Amino Acid
ACEXWXCANXPACTGC

SEQ ID NO: 12604 - protein, 17 aa, Artificial Sequence
  Synthetically generated peptide
  VARIANT (1)..(17): Xaa = Any Amino Acid
ACEXWXCANXXPACTGC

SEQ ID NO: 12605 - protein, 17 aa, Artificial Sequence
  Synthetically generated peptide
  VARIANT (1)..(17): Xaa = Any Amino Acid
ACEXWXCANXPXACTGC

SEQ ID NO: 12606 - protein, 17 aa, Artificial Sequence
  Synthetically generated peptide
  VARIANT (1)..(17): Xaa = Any Amino Acid
ACEXWXCANXPAXCTGC

SEQ ID NO: 12607 - protein, 17 aa, Artificial Sequence
  Synthetically generated peptide
  VARIANT (1)..(17): Xaa = Any Amino Acid
ACEXWXCANXPACXTGC

SEQ ID NO: 12608 - protein, 17 aa, Artificial Sequence
  Synthetically generated peptide
  VARIANT (1)..(17): Xaa = Any Amino Acid
ACEXWXCANXPACTXGC

SEQ ID NO: 12609 - protein, 17 aa, Artificial Sequence
  Synthetically generated peptide
  VARIANT (1)..(17): Xaa = Any Amino Acid
ACEXWXCANXPACTGXC

SEQ ID NO: 12610 - protein, 16 aa, Artificial Sequence
  Synthetically generated peptide
  VARIANT (1)..(16): Xaa = Any Amino Acid
ACEXWXCANPXACTGC

SEQ ID NO: 12611 - protein, 17 aa, Artificial Sequence
  Synthetically generated peptide
  VARIANT (1)..(17): Xaa = Any Amino Acid
ACEXWXCANPXXACTGC

SEQ ID NO: 12612 - protein, 17 aa, Artificial Sequence
  Synthetically generated peptide
  VARIANT (1)..(17): Xaa = Any Amino Acid
ACEXWXCANPXAXCTGC

SEQ ID NO: 12613 - protein, 17 aa, Artificial Sequence
  Synthetically generated peptide
  VARIANT (1)..(17): Xaa = Any Amino Acid
ACEXWXCANPXACXTGC

SEQ ID NO: 12614 - protein, 17 aa, Artificial Sequence
  Synthetically generated peptide
  VARIANT (1)..(17): Xaa = Any Amino Acid
ACEXWXCANPXACTXGC

SEQ ID NO: 12615 - protein, 17 aa, Artificial Sequence
  Synthetically generated peptide
  VARIANT (1)..(17): Xaa = Any Amino Acid
ACEXWXCANPXACTGXC

SEQ ID NO: 12616 - protein, 16 aa, Artificial Sequence
  Synthetically generated peptide
  VARIANT (1)..(16): Xaa = Any Amino Acid
ACEXWXCANPAXCTGC

SEQ ID NO: 12617 - protein, 17 aa, Artificial Sequence
  Synthetically generated peptide
  VARIANT (1)..(17): Xaa = Any Amino Acid
ACEXWXCANPAXXCTGC

SEQ ID NO: 12618 - protein, 17 aa, Artificial Sequence
  Synthetically generated peptide
  VARIANT (1)..(17): Xaa = Any Amino Acid
ACEXWXCANPAXCXTGC

SEQ ID NO: 12619 - protein, 17 aa, Artificial Sequence
  Synthetically generated peptide
  VARIANT (1)..(17): Xaa = Any Amino Acid
ACEXWXCANPAXCTXGC

SEQ ID NO: 12620 - protein, 17 aa, Artificial Sequence
  Synthetically generated peptide
  VARIANT (1)..(17): Xaa = Any Amino Acid
ACEXWXCANPAXCTGXC

SEQ ID NO: 12621 - protein, 16 aa, Artificial Sequence
  Synthetically generated peptide
  VARIANT (1)..(16): Xaa = Any Amino Acid
ACEXWXCANPACXTGC

SEQ ID NO: 12622 - protein, 17 aa, Artificial Sequence
  Synthetically generated peptide
  VARIANT (1)..(17): Xaa = Any Amino Acid
ACEXWXCANPACXXTGC

SEQ ID NO: 12623 - protein, 17 aa, Artificial Sequence
  Synthetically generated peptide
  VARIANT (1)..(17): Xaa = Any Amino Acid
ACEXWXCANPACXTXGC

SEQ ID NO: 12624 - protein, 17 aa, Artificial Sequence
  Synthetically generated peptide
  VARIANT (1)..(17): Xaa = Any Amino Acid
ACEXWXCANPACXTGXC

SEQ ID NO: 12625 - protein, 16 aa, Artificial Sequence
  Synthetically generated peptide
  VARIANT (1)..(16): Xaa = Any Amino Acid
ACEXWXCANPACTXGC

SEQ ID NO: 12626 - protein, 17 aa, Artificial Sequence
  Synthetically generated peptide
  VARIANT (1)..(17): Xaa = Any Amino Acid
ACEXWXCANPACTXXGC

SEQ ID NO: 12627 - protein, 17 aa, Artificial Sequence
  Synthetically generated peptide
  VARIANT (1)..(17): Xaa = Any Amino Acid
ACEXWXCANPACTXGXC

SEQ ID NO: 12628 - protein, 16 aa, Artificial Sequence
  Synthetically generated peptide
  VARIANT (1)..(16): Xaa = Any Amino Acid
ACEXWXCANPACTGXC

SEQ ID NO: 12629 - protein, 17 aa, Artificial Sequence
  Synthetically generated peptide
  VARIANT (1)..(17): Xaa = Any Amino Acid
ACEXWXCANPACTGXXC

SEQ ID NO: 12630 - protein, 15 aa, Artificial Sequence
  Synthetically generated peptide
  VARIANT (1)..(15): Xaa = Any Amino Acid
ACEXWCAXNPACTGC

SEQ ID NO: 12631 - protein, 16 aa, Artificial Sequence
  Synthetically generated peptide
  VARIANT (1)..(16): Xaa = Any Amino Acid
ACEXWCAXXNPACTGC

SEQ ID NO: 12632 - protein, 17 aa, Artificial Sequence
  Synthetically generated peptide
  VARIANT (1)..(17): Xaa = Any Amino Acid
ACEXWCAXXXNPACTGC

SEQ ID NO: 12633 - protein, 17 aa, Artificial Sequence
  Synthetically generated peptide
  VARIANT (1)..(17): Xaa = Any Amino Acid
ACEXWCAXXNXPACTGC

SEQ ID NO: 12634 - protein, 17 aa, Artificial Sequence
  Synthetically generated peptide
  VARIANT (1)..(17): Xaa = Any Amino Acid
ACEXWCAXXNPXACTGC

SEQ ID NO: 12635 - protein, 17 aa, Artificial Sequence
  Synthetically generated peptide
  VARIANT (1)..(17): Xaa = Any Amino Acid
ACEXWCAXXNPAXCTGC

SEQ ID NO: 12636 - protein, 17 aa, Artificial Sequence
  Synthetically generated peptide
  VARIANT (1)..(17): Xaa = Any Amino Acid
ACEXWCAXXNPACXTGC

SEQ ID NO: 12637 - protein, 17 aa, Artificial Sequence
  Synthetically generated peptide
  VARIANT (1)..(17): Xaa = Any Amino Acid
ACEXWCAXXNPACTXGC

SEQ ID NO: 12638 - protein, 17 aa, Artificial Sequence
  Synthetically generated peptide
  VARIANT (1)..(17): Xaa = Any Amino Acid
ACEXWCAXXNPACTGXC

SEQ ID NO: 12639 - protein, 16 aa, Artificial Sequence
  Synthetically generated peptide
  VARIANT (1)..(16): Xaa = Any Amino Acid
ACEXWCAXNXPACTGC

SEQ ID NO: 12640 - protein, 17 aa, Artificial Sequence
  Synthetically generated peptide
  VARIANT (1)..(17): Xaa = Any Amino Acid
ACEXWCAXNXXPACTGC

SEQ ID NO: 12641 - protein, 17 aa, Artificial Sequence
  Synthetically generated peptide
  VARIANT (1)..(17): Xaa = Any Amino Acid
ACEXWCAXNXPXACTGC

SEQ ID NO: 12642 - protein, 17 aa, Artificial Sequence
  Synthetically generated peptide
  VARIANT (1)..(17): Xaa = Any Amino Acid
ACEXWCAXNXPAXCTGC

SEQ ID NO: 12643 - protein, 17 aa, Artificial Sequence
  Synthetically generated peptide
  VARIANT (1)..(17): Xaa = Any Amino Acid
ACEXWCAXNXPACXTGC

SEQ ID NO: 12644 - protein, 17 aa, Artificial Sequence
  Synthetically generated peptide
  VARIANT (1)..(17): Xaa = Any Amino Acid
ACEXWCAXNXPACTXGC

SEQ ID NO: 12645 - protein, 17 aa, Artificial Sequence
  Synthetically generated peptide
  VARIANT (1)..(17): Xaa = Any Amino Acid
ACEXWCAXNXPACTGXC

SEQ ID NO: 12646 - protein, 16 aa, Artificial Sequence
  Synthetically generated peptide
  VARIANT (1)..(16): Xaa = Any Amino Acid
ACEXWCAXNPXACTGC

SEQ ID NO: 12647 - protein, 17 aa, Artificial Sequence
  Synthetically generated peptide
  VARIANT (1)..(17): Xaa = Any Amino Acid
ACEXWCAXNPXXACTGC

SEQ ID NO: 12648 - protein, 17 aa, Artificial Sequence
  Synthetically generated peptide
  VARIANT (1)..(17): Xaa = Any Amino Acid
ACEXWCAXNPXAXCTGC

SEQ ID NO: 12649 - protein, 17 aa, Artificial Sequence
  Synthetically generated peptide
  VARIANT (1)..(17): Xaa = Any Amino Acid
ACEXWCAXNPXACXTGC

SEQ ID NO: 12650 - protein, 17 aa, Artificial Sequence
  Synthetically generated peptide
  VARIANT (1)..(17): Xaa = Any Amino Acid
ACEXWCAXNPXACTXGC

SEQ ID NO: 12651 - protein, 17 aa, Artificial Sequence
  Synthetically generated peptide
  VARIANT (1)..(17): Xaa = Any Amino Acid
ACEXWCAXNPXACTGXC

SEQ ID NO: 12652 - protein, 16 aa, Artificial Sequence
  Synthetically generated peptide
  VARIANT (1)..(16): Xaa = Any Amino Acid
ACEXWCAXNPAXCTGC

SEQ ID NO: 12653 - protein, 17 aa, Artificial Sequence
  Synthetically generated peptide
  VARIANT (1)..(17): Xaa = Any Amino Acid
ACEXWCAXNPAXXCTGC

SEQ ID NO: 12654 - protein, 17 aa, Artificial Sequence
  Synthetically generated peptide
  VARIANT (1)..(17): Xaa = Any Amino Acid
ACEXWCAXNPAXCXTGC

SEQ ID NO: 12655 - protein, 17 aa, Artificial Sequence
  Synthetically generated peptide
  VARIANT (1)..(17): Xaa = Any Amino Acid
ACEXWCAXNPAXCTXGC

SEQ ID NO: 12656 - protein, 17 aa, Artificial Sequence
  Synthetically generated peptide
  VARIANT (1)..(17): Xaa = Any Amino Acid
ACEXWCAXNPAXCTGXC

SEQ ID NO: 12657 - protein, 16 aa, Artificial Sequence
  Synthetically generated peptide
  VARIANT (1)..(16): Xaa = Any Amino Acid
ACEXWCAXNPACXTGC

SEQ ID NO: 12658 - protein, 17 aa, Artificial Sequence
  Synthetically generated peptide
  VARIANT (1)..(17): Xaa = Any Amino Acid
ACEXWCAXNPACXXTGC

SEQ ID NO: 12659 - protein, 17 aa, Artificial Sequence
  Synthetically generated peptide
  VARIANT (1)..(17): Xaa = Any Amino Acid
ACEXWCAXNPACXTXGC

SEQ ID NO: 12660 - protein, 17 aa, Artificial Sequence
  Synthetically generated peptide
  VARIANT (1)..(17): Xaa = Any Amino Acid
ACEXWCAXNPACXTGXC

SEQ ID NO: 12661 - protein, 16 aa, Artificial Sequence
  Synthetically generated peptide
  VARIANT (1)..(16): Xaa = Any Amino Acid
ACEXWCAXNPACTXGC

SEQ ID NO: 12662 - protein, 17 aa, Artificial Sequence
  Synthetically generated peptide
  VARIANT (1)..(17): Xaa = Any Amino Acid
ACEXWCAXNPACTXXGC

SEQ ID NO: 12663 - protein, 17 aa, Artificial Sequence
  Synthetically generated peptide
  VARIANT (1)..(17): Xaa = Any Amino Acid
ACEXWCAXNPACTXGXC

SEQ ID NO: 12664 - protein, 16 aa, Artificial Sequence
  Synthetically generated peptide
  VARIANT (1)..(16): Xaa = Any Amino Acid
ACEXWCAXNPACTGXC

SEQ ID NO: 12665 - protein, 17 aa, Artificial Sequence
  Synthetically generated peptide
  VARIANT (1)..(17): Xaa = Any Amino Acid
ACEXWCAXNPACTGXXC

SEQ ID NO: 12666 - protein, 15 aa, Artificial Sequence
  Synthetically generated peptide
  VARIANT (1)..(15): Xaa = Any Amino Acid
ACEXWCANXPACTGC

SEQ ID NO: 12667 - protein, 16 aa, Artificial Sequence
  Synthetically generated peptide
  VARIANT (1)..(16): Xaa = Any Amino Acid
ACEXWCANXXPACTGC

SEQ ID NO: 12668 - protein, 17 aa, Artificial Sequence
  Synthetically generated peptide
  VARIANT (1)..(17): Xaa = Any Amino Acid
ACEXWCANXXXPACTGC

SEQ ID NO: 12669 - protein, 17 aa, Artificial Sequence
  Synthetically generated peptide
  VARIANT (1)..(17): Xaa = Any Amino Acid
ACEXWCANXXPXACTGC

SEQ ID NO: 12670 - protein, 17 aa, Artificial Sequence
  Synthetically generated peptide
  VARIANT (1)..(17): Xaa = Any Amino Acid
ACEXWCANXXPAXCTGC

SEQ ID NO: 12671 - protein, 17 aa, Artificial Sequence
  Synthetically generated peptide
  VARIANT (1)..(17): Xaa = Any Amino Acid
ACEXWCANXXPACXTGC

SEQ ID NO: 12672 - protein, 17 aa, Artificial Sequence
  Synthetically generated peptide
  VARIANT (1)..(17): Xaa = Any Amino Acid
ACEXWCANXXPACTXGC

SEQ ID NO: 12673 - protein, 17 aa, Artificial Sequence
  Synthetically generated peptide
  VARIANT (1)..(17): Xaa = Any Amino Acid
ACEXWCANXXPACTGXC

SEQ ID NO: 12674 - protein, 16 aa, Artificial Sequence
  Synthetically generated peptide
  VARIANT (1)..(16): Xaa = Any Amino Acid
ACEXWCANXPXACTGC

SEQ ID NO: 12675 - protein, 17 aa, Artificial Sequence
  Synthetically generated peptide
  VARIANT (1)..(17): Xaa = Any Amino Acid
ACEXWCANXPXXACTGC

SEQ ID NO: 12676 - protein, 17 aa, Artificial Sequence
  Synthetically generated peptide
  VARIANT (1)..(17): Xaa = Any Amino Acid
ACEXWCANXPXAXCTGC

SEQ ID NO: 12677 - protein, 17 aa, Artificial Sequence
  Synthetically generated peptide
  VARIANT (1)..(17): Xaa = Any Amino Acid
ACEXWCANXPXACXTGC

SEQ ID NO: 12678 - protein, 17 aa, Artificial Sequence
  Synthetically generated peptide
  VARIANT (1)..(17): Xaa = Any Amino Acid
ACEXWCANXPXACTXGC

SEQ ID NO: 12679 - protein, 17 aa, Artificial Sequence
  Synthetically generated peptide
  VARIANT (1)..(17): Xaa = Any Amino Acid
ACEXWCANXPXACTGXC

SEQ ID NO: 12680 - protein, 16 aa, Artificial Sequence
  Synthetically generated peptide
  VARIANT (1)..(16): Xaa = Any Amino Acid
ACEXWCANXPAXCTGC

SEQ ID NO: 12681 - protein, 17 aa, Artificial Sequence
  Synthetically generated peptide
  VARIANT (1)..(17): Xaa = Any Amino Acid
ACEXWCANXPAXXCTGC

SEQ ID NO: 12682 - protein, 17 aa, Artificial Sequence
  Synthetically generated peptide
  VARIANT (1)..(17): Xaa = Any Amino Acid
ACEXWCANXPAXCXTGC

SEQ ID NO: 12683 - protein, 17 aa, Artificial Sequence
  Synthetically generated peptide
  VARIANT (1)..(17): Xaa = Any Amino Acid
ACEXWCANXPAXCTXGC

SEQ ID NO: 12684 - protein, 17 aa, Artificial Sequence
  Synthetically generated peptide
  VARIANT (1)..(17): Xaa = Any Amino Acid
ACEXWCANXPAXCTGXC

SEQ ID NO: 12685 - protein, 16 aa, Artificial Sequence
  Synthetically generated peptide
  VARIANT (1)..(16): Xaa = Any Amino Acid
ACEXWCANXPACXTGC

SEQ ID NO: 12686 - protein, 17 aa, Artificial Sequence
  Synthetically generated peptide
  VARIANT (1)..(17): Xaa = Any Amino Acid
ACEXWCANXPACXXTGC

SEQ ID NO: 12687 - protein, 17 aa, Artificial Sequence
  Synthetically generated peptide
  VARIANT (1)..(17): Xaa = Any Amino Acid
ACEXWCANXPACXTXGC

SEQ ID NO: 12688 - protein, 17 aa, Artificial Sequence
  Synthetically generated peptide
  VARIANT (1)..(17): Xaa = Any Amino Acid
ACEXWCANXPACXTGXC

SEQ ID NO: 12689 - protein, 16 aa, Artificial Sequence
  Synthetically generated peptide
  VARIANT (1)..(16): Xaa = Any Amino Acid
ACEXWCANXPACTXGC

SEQ ID NO: 12690 - protein, 17 aa, Artificial Sequence
  Synthetically generated peptide
  VARIANT (1)..(17): Xaa = Any Amino Acid
ACEXWCANXPACTXXGC

SEQ ID NO: 12691 - protein, 17 aa, Artificial Sequence
  Synthetically generated peptide
  VARIANT (1)..(17): Xaa = Any Amino Acid
ACEXWCANXPACTXGXC

SEQ ID NO: 12692 - protein, 16 aa, Artificial Sequence
  Synthetically generated peptide
  VARIANT (1)..(16): Xaa = Any Amino Acid
ACEXWCANXPACTGXC

SEQ ID NO: 12693 - protein, 17 aa, Artificial Sequence
  Synthetically generated peptide
  VARIANT (1)..(17): Xaa = Any Amino Acid
ACEXWCANXPACTGXXC

SEQ ID NO: 12694 - protein, 15 aa, Artificial Sequence
  Synthetically generated peptide
  VARIANT (1)..(15): Xaa = Any Amino Acid
ACEXWCANPXACTGC

SEQ ID NO: 12695 - protein, 16 aa, Artificial Sequence
  Synthetically generated peptide
  VARIANT (1)..(16): Xaa = Any Amino Acid
ACEXWCANPXXACTGC

SEQ ID NO: 12696 - protein, 17 aa, Artificial Sequence
  Synthetically generated peptide
  VARIANT (1)..(17): Xaa = Any Amino Acid
ACEXWCANPXXXACTGC

SEQ ID NO: 12697 - protein, 17 aa, Artificial Sequence
  Synthetically generated peptide
  VARIANT (1)..(17): Xaa = Any Amino Acid
ACEXWCANPXXAXCTGC

SEQ ID NO: 12698 - protein, 17 aa, Artificial Sequence
  Synthetically generated peptide
  VARIANT (1)..(17): Xaa = Any Amino Acid
ACEXWCANPXXACXTGC

SEQ ID NO: 12699 - protein, 17 aa, Artificial Sequence
  Synthetically generated peptide
  VARIANT (1)..(17): Xaa = Any Amino Acid
ACEXWCANPXXACTXGC

SEQ ID NO: 12700 - protein, 17 aa, Artificial Sequence
  Synthetically generated peptide
  VARIANT (1)..(17): Xaa = Any Amino Acid
ACEXWCANPXXACTGXC

SEQ ID NO: 12701 - protein, 16 aa, Artificial Sequence
  Synthetically generated peptide
  VARIANT (1)..(16): Xaa = Any Amino Acid
ACEXWCANPXAXCTGC

SEQ ID NO: 12702 - protein, 17 aa, Artificial Sequence
  Synthetically generated peptide
  VARIANT (1)..(17): Xaa = Any Amino Acid
ACEXWCANPXAXXCTGC

SEQ ID NO: 12703 - protein, 17 aa, Artificial Sequence
  Synthetically generated peptide
  VARIANT (1)..(17): Xaa = Any Amino Acid
ACEXWCANPXAXCXTGC

SEQ ID NO: 12704 - protein, 17 aa, Artificial Sequence
  Synthetically generated peptide
  VARIANT (1)..(17): Xaa = Any Amino Acid
ACEXWCANPXAXCTXGC

SEQ ID NO: 12705 - protein, 17 aa, Artificial Sequence
  Synthetically generated peptide
  VARIANT (1)..(17): Xaa = Any Amino Acid
ACEXWCANPXAXCTGXC

SEQ ID NO: 12706 - protein, 16 aa, Artificial Sequence
  Synthetically generated peptide
  VARIANT (1)..(16): Xaa = Any Amino Acid
ACEXWCANPXACXTGC

SEQ ID NO: 12707 - protein, 17 aa, Artificial Sequence
  Synthetically generated peptide
  VARIANT (1)..(17): Xaa = Any Amino Acid
ACEXWCANPXACXXTGC

SEQ ID NO: 12708 - protein, 17 aa, Artificial Sequence
  Synthetically generated peptide
  VARIANT (1)..(17): Xaa = Any Amino Acid
ACEXWCANPXACXTXGC

SEQ ID NO: 12709 - protein, 17 aa, Artificial Sequence
  Synthetically generated peptide
  VARIANT (1)..(17): Xaa = Any Amino Acid
ACEXWCANPXACXTGXC

SEQ ID NO: 12710 - protein, 16 aa, Artificial Sequence
  Synthetically generated peptide
  VARIANT (1)..(16): Xaa = Any Amino Acid
ACEXWCANPXACTXGC

SEQ ID NO: 12711 - protein, 17 aa, Artificial Sequence
  Synthetically generated peptide
  VARIANT (1)..(17): Xaa = Any Amino Acid
ACEXWCANPXACTXXGC

SEQ ID NO: 12712 - protein, 17 aa, Artificial Sequence
  Synthetically generated peptide
  VARIANT (1)..(17): Xaa = Any Amino Acid
ACEXWCANPXACTXGXC

SEQ ID NO: 12713 - protein, 16 aa, Artificial Sequence
  Synthetically generated peptide
  VARIANT (1)..(16): Xaa = Any Amino Acid
ACEXWCANPXACTGXC

SEQ ID NO: 12714 - protein, 17 aa, Artificial Sequence
  Synthetically generated peptide
  VARIANT (1)..(17): Xaa = Any Amino Acid
ACEXWCANPXACTGXXC

SEQ ID NO: 12715 - protein, 15 aa, Artificial Sequence
  Synthetically generated peptide
  VARIANT (1)..(15): Xaa = Any Amino Acid
ACEXWCANPAXCTGC

SEQ ID NO: 12716 - protein, 16 aa, Artificial Sequence
  Synthetically generated peptide
  VARIANT (1)..(16): Xaa = Any Amino Acid
ACEXWCANPAXXCTGC

SEQ ID NO: 12717 - protein, 17 aa, Artificial Sequence
  Synthetically generated peptide
  VARIANT (1)..(17): Xaa = Any Amino Acid
ACEXWCANPAXXXCTGC

SEQ ID NO: 12718 - protein, 17 aa, Artificial Sequence
  Synthetically generated peptide
  VARIANT (1)..(17): Xaa = Any Amino Acid
ACEXWCANPAXXCXTGC

SEQ ID NO: 12719 - protein, 17 aa, Artificial Sequence
  Synthetically generated peptide
  VARIANT (1)..(17): Xaa = Any Amino Acid
ACEXWCANPAXXCTXGC

SEQ ID NO: 12720 - protein, 17 aa, Artificial Sequence
  Synthetically generated peptide
  VARIANT (1)..(17): Xaa = Any Amino Acid
ACEXWCANPAXXCTGXC

SEQ ID NO: 12721 - protein, 16 aa, Artificial Sequence
  Synthetically generated peptide
  VARIANT (1)..(16): Xaa = Any Amino Acid
ACEXWCANPAXCXTGC

SEQ ID NO: 12722 - protein, 17 aa, Artificial Sequence
  Synthetically generated peptide
  VARIANT (1)..(17): Xaa = Any Amino Acid
ACEXWCANPAXCXXTGC

SEQ ID NO: 12723 - protein, 17 aa, Artificial Sequence
  Synthetically generated peptide
  VARIANT (1)..(17): Xaa = Any Amino Acid
ACEXWCANPAXCXTXGC

SEQ ID NO: 12724 - protein, 17 aa, Artificial Sequence
  Synthetically generated peptide
  VARIANT (1)..(17): Xaa = Any Amino Acid
ACEXWCANPAXCXTGXC

SEQ ID NO: 12725 - protein, 16 aa, Artificial Sequence
  Synthetically generated peptide
  VARIANT (1)..(16): Xaa = Any Amino Acid
ACEXWCANPAXCTXGC

SEQ ID NO: 12726 - protein, 17 aa, Artificial Sequence
  Synthetically generated peptide
  VARIANT (1)..(17): Xaa = Any Amino Acid
ACEXWCANPAXCTXXGC

SEQ ID NO: 12727 - protein, 17 aa, Artificial Sequence
  Synthetically generated peptide
  VARIANT (1)..(17): Xaa = Any Amino Acid
ACEXWCANPAXCTXGXC

SEQ ID NO: 12728 - protein, 16 aa, Artificial Sequence
  Synthetically generated peptide
  VARIANT (1)..(16): Xaa = Any Amino Acid
ACEXWCANPAXCTGXC

SEQ ID NO: 12729 - protein, 17 aa, Artificial Sequence
  Synthetically generated peptide
  VARIANT (1)..(17): Xaa = Any Amino Acid
ACEXWCANPAXCTGXXC

SEQ ID NO: 12730 - protein, 15 aa, Artificial Sequence
  Synthetically generated peptide
  VARIANT (1)..(15): Xaa = Any Amino Acid
ACEXWCANPACXTGC

SEQ ID NO: 12731 - protein, 16 aa, Artificial Sequence
  Synthetically generated peptide
  VARIANT (1)..(16): Xaa = Any Amino Acid
ACEXWCANPACXXTGC

SEQ ID NO: 12732 - protein, 17 aa, Artificial Sequence
  Synthetically generated peptide
  VARIANT (1)..(17): Xaa = Any Amino Acid
ACEXWCANPACXXXTGC

SEQ ID NO: 12733 - protein, 17 aa, Artificial Sequence
  Synthetically generated peptide
  VARIANT (1)..(17): Xaa = Any Amino Acid
ACEXWCANPACXXTXGC

SEQ ID NO: 12734 - protein, 17 aa, Artificial Sequence
  Synthetically generated peptide
  VARIANT (1)..(17): Xaa = Any Amino Acid
ACEXWCANPACXXTGXC

SEQ ID NO: 12735 - protein, 16 aa, Artificial Sequence
  Synthetically generated peptide
  VARIANT (1)..(16): Xaa = Any Amino Acid
ACEXWCANPACXTXGC

SEQ ID NO: 12736 - protein, 17 aa, Artificial Sequence
  Synthetically generated peptide
  VARIANT (1)..(17): Xaa = Any Amino Acid
ACEXWCANPACXTXXGC

SEQ ID NO: 12737 - protein, 17 aa, Artificial Sequence
  Synthetically generated peptide
  VARIANT (1)..(17): Xaa = Any Amino Acid
ACEXWCANPACXTXGXC

SEQ ID NO: 12738 - protein, 16 aa, Artificial Sequence
  Synthetically generated peptide
  VARIANT (1)..(16): Xaa = Any Amino Acid
ACEXWCANPACXTGXC

SEQ ID NO: 12739 - protein, 17 aa, Artificial Sequence
  Synthetically generated peptide
  VARIANT (1)..(17): Xaa = Any Amino Acid
ACEXWCANPACXTGXXC

SEQ ID NO: 12740 - protein, 15 aa, Artificial Sequence
  Synthetically generated peptide
  VARIANT (1)..(15): Xaa = Any Amino Acid
ACEXWCANPACTXGC

SEQ ID NO: 12741 - protein, 16 aa, Artificial Sequence
  Synthetically generated peptide
  VARIANT (1)..(16): Xaa = Any Amino Acid
ACEXWCANPACTXXGC

SEQ ID NO: 12742 - protein, 17 aa, Artificial Sequence
  Synthetically generated peptide
  VARIANT (1)..(17): Xaa = Any Amino Acid
ACEXWCANPACTXXXGC

SEQ ID NO: 12743 - protein, 17 aa, Artificial Sequence
  Synthetically generated peptide
  VARIANT (1)..(17): Xaa = Any Amino Acid
ACEXWCANPACTXXGXC

SEQ ID NO: 12744 - protein, 16 aa, Artificial Sequence
  Synthetically generated peptide
  VARIANT (1)..(16): Xaa = Any Amino Acid
ACEXWCANPACTXGXC

SEQ ID NO: 12745 - protein, 17 aa, Artificial Sequence
  Synthetically generated peptide
  VARIANT (1)..(17): Xaa = Any Amino Acid
ACEXWCANPACTXGXXC

SEQ ID NO: 12746 - protein, 15 aa, Artificial Sequence
  Synthetically generated peptide
  VARIANT (1)..(15): Xaa = Any Amino Acid
ACEXWCANPACTGXC

SEQ ID NO: 12747 - protein, 16 aa, Artificial Sequence
  Synthetically generated peptide
  VARIANT (1)..(16): Xaa = Any Amino Acid
ACEXWCANPACTGXXC

SEQ ID NO: 12748 - protein, 17 aa, Artificial Sequence
  Synthetically generated peptide
  VARIANT (1)..(17): Xaa = Any Amino Acid
ACEXWCANPACTGXXXC

SEQ ID NO: 12749 - protein, 14 aa, Artificial Sequence
  Synthetically generated peptide
  VARIANT (1)..(14): Xaa = Any Amino Acid
ACEWXCANPACTGC

SEQ ID NO: 12750 - protein, 15 aa, Artificial Sequence
  Synthetically generated peptide
  VARIANT (1)..(15): Xaa = Any Amino Acid
ACEWXXCANPACTGC

SEQ ID NO: 12751 - protein, 16 aa, Artificial Sequence
  Synthetically generated peptide
  VARIANT (1)..(16): Xaa = Any Amino Acid
ACEWXXXCANPACTGC

SEQ ID NO: 12752 - protein, 17 aa, Artificial Sequence
  Synthetically generated peptide
  VARIANT (1)..(17): Xaa = Any Amino Acid
ACEWXXXXCANPACTGC

SEQ ID NO: 12753 - protein, 17 aa, Artificial Sequence
  Synthetically generated peptide
  VARIANT (1)..(17): Xaa = Any Amino Acid
ACEWXXXCAXNPACTGC

SEQ ID NO: 12754 - protein, 17 aa, Artificial Sequence
  Synthetically generated peptide
  VARIANT (1)..(17): Xaa = Any Amino Acid
ACEWXXXCANXPACTGC

SEQ ID NO: 12755 - protein, 17 aa, Artificial Sequence
  Synthetically generated peptide
  VARIANT (1)..(17): Xaa = Any Amino Acid
ACEWXXXCANPXACTGC

SEQ ID NO: 12756 - protein, 17 aa, Artificial Sequence
  Synthetically generated peptide
  VARIANT (1)..(17): Xaa = Any Amino Acid
ACEWXXXCANPAXCTGC

SEQ ID NO: 12757 - protein, 17 aa, Artificial Sequence
  Synthetically generated peptide
  VARIANT (1)..(17): Xaa = Any Amino Acid
ACEWXXXCANPACXTGC

SEQ ID NO: 12758 - protein, 17 aa, Artificial Sequence
  Synthetically generated peptide
  VARIANT (1)..(17): Xaa = Any Amino Acid
ACEWXXXCANPACTXGC

SEQ ID NO: 12759 - protein, 17 aa, Artificial Sequence
  Synthetically generated peptide
  VARIANT (1)..(17): Xaa = Any Amino Acid
ACEWXXXCANPACTGXC

SEQ ID NO: 12760 - protein, 16 aa, Artificial Sequence
  Synthetically generated peptide
  VARIANT (1)..(16): Xaa = Any Amino Acid
ACEWXXCAXNPACTGC

SEQ ID NO: 12761 - protein, 17 aa, Artificial Sequence
  Synthetically generated peptide
  VARIANT (1)..(17): Xaa = Any Amino Acid
ACEWXXCAXXNPACTGC

SEQ ID NO: 12762 - protein, 17 aa, Artificial Sequence
  Synthetically generated peptide
  VARIANT (1)..(17): Xaa = Any Amino Acid
ACEWXXCAXNXPACTGC

SEQ ID NO: 12763 - protein, 17 aa, Artificial Sequence
  Synthetically generated peptide
  VARIANT (1)..(17): Xaa = Any Amino Acid
ACEWXXCAXNPXACTGC

SEQ ID NO: 12764 - protein, 17 aa, Artificial Sequence
  Synthetically generated peptide
  VARIANT (1)..(17): Xaa = Any Amino Acid
ACEWXXCAXNPAXCTGC

SEQ ID NO: 12765 - protein, 17 aa, Artificial Sequence
  Synthetically generated peptide
  VARIANT (1)..(17): Xaa = Any Amino Acid
ACEWXXCAXNPACXTGC

SEQ ID NO: 12766 - protein, 17 aa, Artificial Sequence
  Synthetically generated peptide
  VARIANT (1)..(17): Xaa = Any Amino Acid
ACEWXXCAXNPACTXGC

SEQ ID NO: 12767 - protein, 17 aa, Artificial Sequence
  Synthetically generated peptide
  VARIANT (1)..(17): Xaa = Any Amino Acid
ACEWXXCAXNPACTGXC

SEQ ID NO: 12768 - protein, 16 aa, Artificial Sequence
  Synthetically generated peptide
  VARIANT (1)..(16): Xaa = Any Amino Acid
ACEWXXCANXPACTGC

SEQ ID NO: 12769 - protein, 17 aa, Artificial Sequence
  Synthetically generated peptide
  VARIANT (1)..(17): Xaa = Any Amino Acid
ACEWXXCANXXPACTGC

SEQ ID NO: 12770 - protein, 17 aa, Artificial Sequence
  Synthetically generated peptide
  VARIANT (1)..(17): Xaa = Any Amino Acid
ACEWXXCANXPXACTGC

SEQ ID NO: 12771 - protein, 17 aa, Artificial Sequence
  Synthetically generated peptide
  VARIANT (1)..(17): Xaa = Any Amino Acid
ACEWXXCANXPAXCTGC

SEQ ID NO: 12772 - protein, 17 aa, Artificial Sequence
  Synthetically generated peptide
  VARIANT (1)..(17): Xaa = Any Amino Acid
ACEWXXCANXPACXTGC

SEQ ID NO: 12773 - protein, 17 aa, Artificial Sequence
  Synthetically generated peptide
  VARIANT (1)..(17): Xaa = Any Amino Acid
ACEWXXCANXPACTXGC

SEQ ID NO: 12774 - protein, 17 aa, Artificial Sequence
  Synthetically generated peptide
  VARIANT (1)..(17): Xaa = Any Amino Acid
ACEWXXCANXPACTGXC

SEQ ID NO: 12775 - protein, 16 aa, Artificial Sequence
  Synthetically generated peptide
  VARIANT (1)..(16): Xaa = Any Amino Acid
ACEWXXCANPXACTGC

SEQ ID NO: 12776 - protein, 17 aa, Artificial Sequence
  Synthetically generated peptide
  VARIANT (1)..(17): Xaa = Any Amino Acid
ACEWXXCANPXXACTGC

SEQ ID NO: 12777 - protein, 17 aa, Artificial Sequence
  Synthetically generated peptide
  VARIANT (1)..(17): Xaa = Any Amino Acid
ACEWXXCANPXAXCTGC

SEQ ID NO: 12778 - protein, 17 aa, Artificial Sequence
  Synthetically generated peptide
  VARIANT (1)..(17): Xaa = Any Amino Acid
ACEWXXCANPXACXTGC

SEQ ID NO: 12779 - protein, 17 aa, Artificial Sequence
  Synthetically generated peptide
  VARIANT (1)..(17): Xaa = Any Amino Acid
ACEWXXCANPXACTXGC

SEQ ID NO: 12780 - protein, 17 aa, Artificial Sequence
  Synthetically generated peptide
  VARIANT (1)..(17): Xaa = Any Amino Acid
ACEWXXCANPXACTGXC

SEQ ID NO: 12781 - protein, 16 aa, Artificial Sequence
  Synthetically generated peptide
  VARIANT (1)..(16): Xaa = Any Amino Acid
ACEWXXCANPAXCTGC

SEQ ID NO: 12782 - protein, 17 aa, Artificial Sequence
  Synthetically generated peptide
  VARIANT (1)..(17): Xaa = Any Amino Acid
ACEWXXCANPAXXCTGC

SEQ ID NO: 12783 - protein, 17 aa, Artificial Sequence
  Synthetically generated peptide
  VARIANT (1)..(17): Xaa = Any Amino Acid
ACEWXXCANPAXCXTGC

SEQ ID NO: 12784 - protein, 17 aa, Artificial Sequence
  Synthetically generated peptide
  VARIANT (1)..(17): Xaa = Any Amino Acid
ACEWXXCANPAXCTXGC

SEQ ID NO: 12785 - protein, 17 aa, Artificial Sequence
  Synthetically generated peptide
  VARIANT (1)..(17): Xaa = Any Amino Acid
ACEWXXCANPAXCTGXC

SEQ ID NO: 12786 - protein, 16 aa, Artificial Sequence
  Synthetically generated peptide
  VARIANT (1)..(16): Xaa = Any Amino Acid
ACEWXXCANPACXTGC

SEQ ID NO: 12787 - protein, 17 aa, Artificial Sequence
  Synthetically generated peptide
  VARIANT (1)..(17): Xaa = Any Amino Acid
ACEWXXCANPACXXTGC

SEQ ID NO: 12788 - protein, 17 aa, Artificial Sequence
  Synthetically generated peptide
  VARIANT (1)..(17): Xaa = Any Amino Acid
ACEWXXCANPACXTXGC

SEQ ID NO: 12789 - protein, 17 aa, Artificial Sequence
  Synthetically generated peptide
  VARIANT (1)..(17): Xaa = Any Amino Acid
ACEWXXCANPACXTGXC

SEQ ID NO: 12790 - protein, 16 aa, Artificial Sequence
  Synthetically generated peptide
  VARIANT (1)..(16): Xaa = Any Amino Acid
ACEWXXCANPACTXGC

SEQ ID NO: 12791 - protein, 17 aa, Artificial Sequence
  Synthetically generated peptide
  VARIANT (1)..(17): Xaa = Any Amino Acid
ACEWXXCANPACTXXGC

SEQ ID NO: 12792 - protein, 17 aa, Artificial Sequence
  Synthetically generated peptide
  VARIANT (1)..(17): Xaa = Any Amino Acid
ACEWXXCANPACTXGXC

SEQ ID NO: 12793 - protein, 16 aa, Artificial Sequence
  Synthetically generated peptide
  VARIANT (1)..(16): Xaa = Any Amino Acid
ACEWXXCANPACTGXC

SEQ ID NO: 12794 - protein, 17 aa, Artificial Sequence
  Synthetically generated peptide
  VARIANT (1)..(17): Xaa = Any Amino Acid
ACEWXXCANPACTGXXC

SEQ ID NO: 12795 - protein, 15 aa, Artificial Sequence
  Synthetically generated peptide
  VARIANT (1)..(15): Xaa = Any Amino Acid
ACEWXCAXNPACTGC

SEQ ID NO: 12796 - protein, 16 aa, Artificial Sequence
  Synthetically generated peptide
  VARIANT (1)..(16): Xaa = Any Amino Acid
ACEWXCAXXNPACTGC

SEQ ID NO: 12797 - protein, 17 aa, Artificial Sequence
  Synthetically generated peptide
  VARIANT (1)..(17): Xaa = Any Amino Acid
ACEWXCAXXXNPACTGC

SEQ ID NO: 12798 - protein, 17 aa, Artificial Sequence
  Synthetically generated peptide
  VARIANT (1)..(17): Xaa = Any Amino Acid
ACEWXCAXXNXPACTGC

SEQ ID NO: 12799 - protein, 17 aa, Artificial Sequence
  Synthetically generated peptide
  VARIANT (1)..(17): Xaa = Any Amino Acid
ACEWXCAXXNPXACTGC

SEQ ID NO: 12800 - protein, 17 aa, Artificial Sequence
  Synthetically generated peptide
  VARIANT (1)..(17): Xaa = Any Amino Acid
ACEWXCAXXNPAXCTGC

SEQ ID NO: 12801 - protein, 17 aa, Artificial Sequence
  Synthetically generated peptide
  VARIANT (1)..(17): Xaa = Any Amino Acid
ACEWXCAXXNPACXTGC

SEQ ID NO: 12802 - protein, 17 aa, Artificial Sequence
  Synthetically generated peptide
  VARIANT (1)..(17): Xaa = Any Amino Acid
ACEWXCAXXNPACTXGC

SEQ ID NO: 12803 - protein, 17 aa, Artificial Sequence
  Synthetically generated peptide
  VARIANT (1)..(17): Xaa = Any Amino Acid
ACEWXCAXXNPACTGXC

SEQ ID NO: 12804 - protein, 16 aa, Artificial Sequence
  Synthetically generated peptide
  VARIANT (1)..(16): Xaa = Any Amino Acid
ACEWXCAXNXPACTGC

SEQ ID NO: 12805 - protein, 17 aa, Artificial Sequence
  Synthetically generated peptide
  VARIANT (1)..(17): Xaa = Any Amino Acid
ACEWXCAXNXXPACTGC

SEQ ID NO: 12806 - protein, 17 aa, Artificial Sequence
  Synthetically generated peptide
  VARIANT (1)..(17): Xaa = Any Amino Acid
ACEWXCAXNXPXACTGC

SEQ ID NO: 12807 - protein, 17 aa, Artificial Sequence
  Synthetically generated peptide
  VARIANT (1)..(17): Xaa = Any Amino Acid
ACEWXCAXNXPAXCTGC

SEQ ID NO: 12808 - protein, 17 aa, Artificial Sequence
  Synthetically generated peptide
  VARIANT (1)..(17): Xaa = Any Amino Acid
ACEWXCAXNXPACXTGC

SEQ ID NO: 12809 - protein, 17 aa, Artificial Sequence
  Synthetically generated peptide
  VARIANT (1)..(17): Xaa = Any Amino Acid
ACEWXCAXNXPACTXGC

SEQ ID NO: 12810 - protein, 17 aa, Artificial Sequence
  Synthetically generated peptide
  VARIANT (1)..(17): Xaa = Any Amino Acid
ACEWXCAXNXPACTGXC

SEQ ID NO: 12811 - protein, 16 aa, Artificial Sequence
  Synthetically generated peptide
  VARIANT (1)..(16): Xaa = Any Amino Acid
ACEWXCAXNPXACTGC

SEQ ID NO: 12812 - protein, 17 aa, Artificial Sequence
  Synthetically generated peptide
  VARIANT (1)..(17): Xaa = Any Amino Acid
ACEWXCAXNPXXACTGC

SEQ ID NO: 12813 - protein, 17 aa, Artificial Sequence
  Synthetically generated peptide
  VARIANT (1)..(17): Xaa = Any Amino Acid
ACEWXCAXNPXAXCTGC

SEQ ID NO: 12814 - protein, 17 aa, Artificial Sequence
  Synthetically generated peptide
  VARIANT (1)..(17): Xaa = Any Amino Acid
ACEWXCAXNPXACXTGC

SEQ ID NO: 12815 - protein, 17 aa, Artificial Sequence
  Synthetically generated peptide
  VARIANT (1)..(17): Xaa = Any Amino Acid
ACEWXCAXNPXACTXGC

SEQ ID NO: 12816 - protein, 17 aa, Artificial Sequence
  Synthetically generated peptide
  VARIANT (1)..(17): Xaa = Any Amino Acid
ACEWXCAXNPXACTGXC

SEQ ID NO: 12817 - protein, 16 aa, Artificial Sequence
  Synthetically generated peptide
  VARIANT (1)..(16): Xaa = Any Amino Acid
ACEWXCAXNPAXCTGC

SEQ ID NO: 12818 - protein, 17 aa, Artificial Sequence
  Synthetically generated peptide
  VARIANT (1)..(17): Xaa = Any Amino Acid
ACEWXCAXNPAXXCTGC

SEQ ID NO: 12819 - protein, 17 aa, Artificial Sequence
  Synthetically generated peptide
  VARIANT (1)..(17): Xaa = Any Amino Acid
ACEWXCAXNPAXCXTGC

SEQ ID NO: 12820 - protein, 17 aa, Artificial Sequence
  Synthetically generated peptide
  VARIANT (1)..(17): Xaa = Any Amino Acid
ACEWXCAXNPAXCTXGC

SEQ ID NO: 12821 - protein, 17 aa, Artificial Sequence
  Synthetically generated peptide
  VARIANT (1)..(17): Xaa = Any Amino Acid
ACEWXCAXNPAXCTGXC

SEQ ID NO: 12822 - protein, 16 aa, Artificial Sequence
  Synthetically generated peptide
  VARIANT (1)..(16): Xaa = Any Amino Acid
ACEWXCAXNPACXTGC

SEQ ID NO: 12823 - protein, 17 aa, Artificial Sequence
  Synthetically generated peptide
  VARIANT (1)..(17): Xaa = Any Amino Acid
ACEWXCAXNPACXXTGC

SEQ ID NO: 12824 - protein, 17 aa, Artificial Sequence
  Synthetically generated peptide
  VARIANT (1)..(17): Xaa = Any Amino Acid
ACEWXCAXNPACXTXGC

SEQ ID NO: 12825 - protein, 17 aa, Artificial Sequence
  Synthetically generated peptide
  VARIANT (1)..(17): Xaa = Any Amino Acid
ACEWXCAXNPACXTGXC

SEQ ID NO: 12826 - protein, 16 aa, Artificial Sequence
  Synthetically generated peptide
  VARIANT (1)..(16): Xaa = Any Amino Acid
ACEWXCAXNPACTXGC

SEQ ID NO: 12827 - protein, 17 aa, Artificial Sequence
  Synthetically generated peptide
  VARIANT (1)..(17): Xaa = Any Amino Acid
ACEWXCAXNPACTXXGC

SEQ ID NO: 12828 - protein, 17 aa, Artificial Sequence
  Synthetically generated peptide
  VARIANT (1)..(17): Xaa = Any Amino Acid
ACEWXCAXNPACTXGXC

SEQ ID NO: 12829 - protein, 16 aa, Artificial Sequence
  Synthetically generated peptide
  VARIANT (1)..(16): Xaa = Any Amino Acid
ACEWXCAXNPACTGXC

SEQ ID NO: 12830 - protein, 17 aa, Artificial Sequence
  Synthetically generated peptide
  VARIANT (1)..(17): Xaa = Any Amino Acid
ACEWXCAXNPACTGXXC

SEQ ID NO: 12831 - protein, 15 aa, Artificial Sequence
  Synthetically generated peptide
  VARIANT (1)..(15): Xaa = Any Amino Acid
ACEWXCANXPACTGC

SEQ ID NO: 12832 - protein, 16 aa, Artificial Sequence
  Synthetically generated peptide
  VARIANT (1)..(16): Xaa = Any Amino Acid
ACEWXCANXXPACTGC

SEQ ID NO: 12833 - protein, 17 aa, Artificial Sequence
  Synthetically generated peptide
  VARIANT (1)..(17): Xaa = Any Amino Acid
ACEWXCANXXXPACTGC

SEQ ID NO: 12834 - protein, 17 aa, Artificial Sequence
  Synthetically generated peptide
  VARIANT (1)..(17): Xaa = Any Amino Acid
ACEWXCANXXPXACTGC

SEQ ID NO: 12835 - protein, 17 aa, Artificial Sequence
  Synthetically generated peptide
  VARIANT (1)..(17): Xaa = Any Amino Acid
ACEWXCANXXPAXCTGC

SEQ ID NO: 12836 - protein, 17 aa, Artificial Sequence
  Synthetically generated peptide
  VARIANT (1)..(17): Xaa = Any Amino Acid
ACEWXCANXXPACXTGC

SEQ ID NO: 12837 - protein, 17 aa, Artificial Sequence
  Synthetically generated peptide
  VARIANT (1)..(17): Xaa = Any Amino Acid
ACEWXCANXXPACTXGC

SEQ ID NO: 12838 - protein, 17 aa, Artificial Sequence
  Synthetically generated peptide
  VARIANT (1)..(17): Xaa = Any Amino Acid
ACEWXCANXXPACTGXC

SEQ ID NO: 12839 - protein, 16 aa, Artificial Sequence
  Synthetically generated peptide
  VARIANT (1)..(16): Xaa = Any Amino Acid
ACEWXCANXPXACTGC

SEQ ID NO: 12840 - protein, 17 aa, Artificial Sequence
  Synthetically generated peptide
  VARIANT (1)..(17): Xaa = Any Amino Acid
ACEWXCANXPXXACTGC

SEQ ID NO: 12841 - protein, 17 aa, Artificial Sequence
  Synthetically generated peptide
  VARIANT (1)..(17): Xaa = Any Amino Acid
ACEWXCANXPXAXCTGC

SEQ ID NO: 12842 - protein, 17 aa, Artificial Sequence
  Synthetically generated peptide
  VARIANT (1)..(17): Xaa = Any Amino Acid
ACEWXCANXPXACXTGC

SEQ ID NO: 12843 - protein, 17 aa, Artificial Sequence
  Synthetically generated peptide
  VARIANT (1)..(17): Xaa = Any Amino Acid
ACEWXCANXPXACTXGC

SEQ ID NO: 12844 - protein, 17 aa, Artificial Sequence
  Synthetically generated peptide
  VARIANT (1)..(17): Xaa = Any Amino Acid
ACEWXCANXPXACTGXC

SEQ ID NO: 12845 - protein, 16 aa, Artificial Sequence
  Synthetically generated peptide
  VARIANT (1)..(16): Xaa = Any Amino Acid
ACEWXCANXPAXCTGC

SEQ ID NO: 12846 - protein, 17 aa, Artificial Sequence
  Synthetically generated peptide
  VARIANT (1)..(17): Xaa = Any Amino Acid
ACEWXCANXPAXXCTGC

SEQ ID NO: 12847 - protein, 17 aa, Artificial Sequence
  Synthetically generated peptide
  VARIANT (1)..(17): Xaa = Any Amino Acid
ACEWXCANXPAXCXTGC

SEQ ID NO: 12848 - protein, 17 aa, Artificial Sequence
  Synthetically generated peptide
  VARIANT (1)..(17): Xaa = Any Amino Acid
ACEWXCANXPAXCTXGC

SEQ ID NO: 12849 - protein, 17 aa, Artificial Sequence
  Synthetically generated peptide
  VARIANT (1)..(17): Xaa = Any Amino Acid
ACEWXCANXPAXCTGXC

SEQ ID NO: 12850 - protein, 16 aa, Artificial Sequence
  Synthetically generated peptide
  VARIANT (1)..(16): Xaa = Any Amino Acid
ACEWXCANXPACXTGC

SEQ ID NO: 12851 - protein, 17 aa, Artificial Sequence
  Synthetically generated peptide
  VARIANT (1)..(17): Xaa = Any Amino Acid
ACEWXCANXPACXXTGC

SEQ ID NO: 12852 - protein, 17 aa, Artificial Sequence
  Synthetically generated peptide
  VARIANT (1)..(17): Xaa = Any Amino Acid
ACEWXCANXPACXTXGC

SEQ ID NO: 12853 - protein, 17 aa, Artificial Sequence
  Synthetically generated peptide
  VARIANT (1)..(17): Xaa = Any Amino Acid
ACEWXCANXPACXTGXC

SEQ ID NO: 12854 - protein, 16 aa, Artificial Sequence
  Synthetically generated peptide
  VARIANT (1)..(16): Xaa = Any Amino Acid
ACEWXCANXPACTXGC

SEQ ID NO: 12855 - protein, 17 aa, Artificial Sequence
  Synthetically generated peptide
  VARIANT (1)..(17): Xaa = Any Amino Acid
ACEWXCANXPACTXXGC

SEQ ID NO: 12856 - protein, 17 aa, Artificial Sequence
  Synthetically generated peptide
  VARIANT (1)..(17): Xaa = Any Amino Acid
ACEWXCANXPACTXGXC

SEQ ID NO: 12857 - protein, 16 aa, Artificial Sequence
  Synthetically generated peptide
  VARIANT (1)..(16): Xaa = Any Amino Acid
ACEWXCANXPACTGXC

SEQ ID NO: 12858 - protein, 17 aa, Artificial Sequence
  Synthetically generated peptide
  VARIANT (1)..(17): Xaa = Any Amino Acid
ACEWXCANXPACTGXXC

SEQ ID NO: 12859 - protein, 15 aa, Artificial Sequence
  Synthetically generated peptide
  VARIANT (1)..(15): Xaa = Any Amino Acid
ACEWXCANPXACTGC

SEQ ID NO: 12860 - protein, 16 aa, Artificial Sequence
  Synthetically generated peptide
  VARIANT (1)..(16): Xaa = Any Amino Acid
ACEWXCANPXXACTGC

SEQ ID NO: 12861 - protein, 17 aa, Artificial Sequence
  Synthetically generated peptide
  VARIANT (1)..(17): Xaa = Any Amino Acid
ACEWXCANPXXXACTGC

SEQ ID NO: 12862 - protein, 17 aa, Artificial Sequence
  Synthetically generated peptide
  VARIANT (1)..(17): Xaa = Any Amino Acid
ACEWXCANPXXAXCTGC

SEQ ID NO: 12863 - protein, 17 aa, Artificial Sequence
  Synthetically generated peptide
  VARIANT (1)..(17): Xaa = Any Amino Acid
ACEWXCANPXXACXTGC

SEQ ID NO: 12864 - protein, 17 aa, Artificial Sequence
  Synthetically generated peptide
  VARIANT (1)..(17): Xaa = Any Amino Acid
ACEWXCANPXXACTXGC

SEQ ID NO: 12865 - protein, 17 aa, Artificial Sequence
  Synthetically generated peptide
  VARIANT (1)..(17): Xaa = Any Amino Acid
ACEWXCANPXXACTGXC

SEQ ID NO: 12866 - protein, 16 aa, Artificial Sequence
  Synthetically generated peptide
  VARIANT (1)..(16): Xaa = Any Amino Acid
ACEWXCANPXAXCTGC

SEQ ID NO: 12867 - protein, 17 aa, Artificial Sequence
  Synthetically generated peptide
  VARIANT (1)..(17): Xaa = Any Amino Acid
ACEWXCANPXAXXCTGC

SEQ ID NO: 12868 - protein, 17 aa, Artificial Sequence
  Synthetically generated peptide
  VARIANT (1)..(17): Xaa = Any Amino Acid
ACEWXCANPXAXCXTGC

SEQ ID NO: 12869 - protein, 17 aa, Artificial Sequence
  Synthetically generated peptide
  VARIANT (1)..(17): Xaa = Any Amino Acid
ACEWXCANPXAXCTXGC

SEQ ID NO: 12870 - protein, 17 aa, Artificial Sequence
  Synthetically generated peptide
  VARIANT (1)..(17): Xaa = Any Amino Acid
ACEWXCANPXAXCTGXC

SEQ ID NO: 12871 - protein, 16 aa, Artificial Sequence
  Synthetically generated peptide
  VARIANT (1)..(16): Xaa = Any Amino Acid
ACEWXCANPXACXTGC

SEQ ID NO: 12872 - protein, 17 aa, Artificial Sequence
  Synthetically generated peptide
  VARIANT (1)..(17): Xaa = Any Amino Acid
ACEWXCANPXACXXTGC

SEQ ID NO: 12873 - protein, 17 aa, Artificial Sequence
  Synthetically generated peptide
  VARIANT (1)..(17): Xaa = Any Amino Acid
ACEWXCANPXACXTXGC

SEQ ID NO: 12874 - protein, 17 aa, Artificial Sequence
  Synthetically generated peptide
  VARIANT (1)..(17): Xaa = Any Amino Acid
ACEWXCANPXACXTGXC

SEQ ID NO: 12875 - protein, 16 aa, Artificial Sequence
  Synthetically generated peptide
  VARIANT (1)..(16): Xaa = Any Amino Acid
ACEWXCANPXACTXGC

SEQ ID NO: 12876 - protein, 17 aa, Artificial Sequence
  Synthetically generated peptide
  VARIANT (1)..(17): Xaa = Any Amino Acid
ACEWXCANPXACTXXGC

SEQ ID NO: 12877 - protein, 17 aa, Artificial Sequence
  Synthetically generated peptide
  VARIANT (1)..(17): Xaa = Any Amino Acid
ACEWXCANPXACTXGXC

SEQ ID NO: 12878 - protein, 16 aa, Artificial Sequence
  Synthetically generated peptide
  VARIANT (1)..(16): Xaa = Any Amino Acid
ACEWXCANPXACTGXC

SEQ ID NO: 12879 - protein, 17 aa, Artificial Sequence
  Synthetically generated peptide
  VARIANT (1)..(17): Xaa = Any Amino Acid
ACEWXCANPXACTGXXC

SEQ ID NO: 12880 - protein, 15 aa, Artificial Sequence
  Synthetically generated peptide
  VARIANT (1)..(15): Xaa = Any Amino Acid
ACEWXCANPAXCTGC

SEQ ID NO: 12881 - protein, 16 aa, Artificial Sequence
  Synthetically generated peptide
  VARIANT (1)..(16): Xaa = Any Amino Acid
ACEWXCANPAXXCTGC

SEQ ID NO: 12882 - protein, 17 aa, Artificial Sequence
  Synthetically generated peptide
  VARIANT (1)..(17): Xaa = Any Amino Acid
ACEWXCANPAXXXCTGC

SEQ ID NO: 12883 - protein, 17 aa, Artificial Sequence
  Synthetically generated peptide
  VARIANT (1)..(17): Xaa = Any Amino Acid
ACEWXCANPAXXCXTGC

SEQ ID NO: 12884 - protein, 17 aa, Artificial Sequence
  Synthetically generated peptide
  VARIANT (1)..(17): Xaa = Any Amino Acid
ACEWXCANPAXXCTXGC

SEQ ID NO: 12885 - protein, 17 aa, Artificial Sequence
  Synthetically generated peptide
  VARIANT (1)..(17): Xaa = Any Amino Acid
ACEWXCANPAXXCTGXC

SEQ ID NO: 12886 - protein, 16 aa, Artificial Sequence
  Synthetically generated peptide
  VARIANT (1)..(16): Xaa = Any Amino Acid
ACEWXCANPAXCXTGC

SEQ ID NO: 12887 - protein, 17 aa, Artificial Sequence
  Synthetically generated peptide
  VARIANT (1)..(17): Xaa = Any Amino Acid
ACEWXCANPAXCXXTGC

SEQ ID NO: 12888 - protein, 17 aa, Artificial Sequence
  Synthetically generated peptide
  VARIANT (1)..(17): Xaa = Any Amino Acid
ACEWXCANPAXCXTXGC

SEQ ID NO: 12889 - protein, 17 aa, Artificial Sequence
  Synthetically generated peptide
  VARIANT (1)..(17): Xaa = Any Amino Acid
ACEWXCANPAXCXTGXC

SEQ ID NO: 12890 - protein, 16 aa, Artificial Sequence
  Synthetically generated peptide
  VARIANT (1)..(16): Xaa = Any Amino Acid
ACEWXCANPAXCTXGC

SEQ ID NO: 12891 - protein, 17 aa, Artificial Sequence
  Synthetically generated peptide
  VARIANT (1)..(17): Xaa = Any Amino Acid
ACEWXCANPAXCTXXGC

SEQ ID NO: 12892 - protein, 17 aa, Artificial Sequence
  Synthetically generated peptide
  VARIANT (1)..(17): Xaa = Any Amino Acid
ACEWXCANPAXCTXGXC

SEQ ID NO: 12893 - protein, 16 aa, Artificial Sequence
  Synthetically generated peptide
  VARIANT (1)..(16): Xaa = Any Amino Acid
ACEWXCANPAXCTGXC

SEQ ID NO: 12894 - protein, 17 aa, Artificial Sequence
  Synthetically generated peptide
  VARIANT (1)..(17): Xaa = Any Amino Acid
ACEWXCANPAXCTGXXC

SEQ ID NO: 12895 - protein, 15 aa, Artificial Sequence
  Synthetically generated peptide
  VARIANT (1)..(15): Xaa = Any Amino Acid
ACEWXCANPACXTGC

SEQ ID NO: 12896 - protein, 16 aa, Artificial Sequence
  Synthetically generated peptide
  VARIANT (1)..(16): Xaa = Any Amino Acid
ACEWXCANPACXXTGC

SEQ ID NO: 12897 - protein, 17 aa, Artificial Sequence
  Synthetically generated peptide
  VARIANT (1)..(17): Xaa = Any Amino Acid
ACEWXCANPACXXXTGC

SEQ ID NO: 12898 - protein, 17 aa, Artificial Sequence
  Synthetically generated peptide
  VARIANT (1)..(17): Xaa = Any Amino Acid
ACEWXCANPACXXTXGC

SEQ ID NO: 12899 - protein, 17 aa, Artificial Sequence
  Synthetically generated peptide
  VARIANT (1)..(17): Xaa = Any Amino Acid
ACEWXCANPACXXTGXC

SEQ ID NO: 12900 - protein, 16 aa, Artificial Sequence
  Synthetically generated peptide
  VARIANT (1)..(16): Xaa = Any Amino Acid
ACEWXCANPACXTXGC

SEQ ID NO: 12901 - protein, 17 aa, Artificial Sequence
  Synthetically generated peptide
  VARIANT (1)..(17): Xaa = Any Amino Acid
ACEWXCANPACXTXXGC

SEQ ID NO: 12902 - protein, 17 aa, Artificial Sequence
  Synthetically generated peptide
  VARIANT (1)..(17): Xaa = Any Amino Acid
ACEWXCANPACXTXGXC

SEQ ID NO: 12903 - protein, 16 aa, Artificial Sequence
  Synthetically generated peptide
  VARIANT (1)..(16): Xaa = Any Amino Acid
ACEWXCANPACXTGXC

SEQ ID NO: 12904 - protein, 17 aa, Artificial Sequence
  Synthetically generated peptide
  VARIANT (1)..(17): Xaa = Any Amino Acid
ACEWXCANPACXTGXXC

SEQ ID NO: 12905 - protein, 15 aa, Artificial Sequence
  Synthetically generated peptide
  VARIANT (1)..(15): Xaa = Any Amino Acid
ACEWXCANPACTXGC

SEQ ID NO: 12906 - protein, 16 aa, Artificial Sequence
  Synthetically generated peptide
  VARIANT (1)..(16): Xaa = Any Amino Acid
ACEWXCANPACTXXGC

SEQ ID NO: 12907 - protein, 17 aa, Artificial Sequence
  Synthetically generated peptide
  VARIANT (1)..(17): Xaa = Any Amino Acid
ACEWXCANPACTXXXGC

SEQ ID NO: 12908 - protein, 17 aa, Artificial Sequence
  Synthetically generated peptide
  VARIANT (1)..(17): Xaa = Any Amino Acid
ACEWXCANPACTXXGXC

SEQ ID NO: 12909 - protein, 16 aa, Artificial Sequence
  Synthetically generated peptide
  VARIANT (1)..(16): Xaa = Any Amino Acid
ACEWXCANPACTXGXC

SEQ ID NO: 12910 - protein, 17 aa, Artificial Sequence
  Synthetically generated peptide
  VARIANT (1)..(17): Xaa = Any Amino Acid
ACEWXCANPACTXGXXC

SEQ ID NO: 12911 - protein, 15 aa, Artificial Sequence
  Synthetically generated peptide
  VARIANT (1)..(15): Xaa = Any Amino Acid
ACEWXCANPACTGXC

SEQ ID NO: 12912 - protein, 16 aa, Artificial Sequence
  Synthetically generated peptide
  VARIANT (1)..(16): Xaa = Any Amino Acid
ACEWXCANPACTGXXC

SEQ ID NO: 12913 - protein, 17 aa, Artificial Sequence
  Synthetically generated peptide
  VARIANT (1)..(17): Xaa = Any Amino Acid
ACEWXCANPACTGXXXC

SEQ ID NO: 12914 - protein, 14 aa, Artificial Sequence
  Synthetically generated peptide
  VARIANT (1)..(14): Xaa = Any Amino Acid
ACEWCAXNPACTGC

SEQ ID NO: 12915 - protein, 15 aa, Artificial Sequence
  Synthetically generated peptide
  VARIANT (1)..(15): Xaa = Any Amino Acid
ACEWCAXXNPACTGC

SEQ ID NO: 12916 - protein, 16 aa, Artificial Sequence
  Synthetically generated peptide
  VARIANT (1)..(16): Xaa = Any Amino Acid
ACEWCAXXXNPACTGC

SEQ ID NO: 12917 - protein, 17 aa, Artificial Sequence
  Synthetically generated peptide
  VARIANT (1)..(17): Xaa = Any Amino Acid
ACEWCAXXXXNPACTGC

SEQ ID NO: 12918 - protein, 17 aa, Artificial Sequence
  Synthetically generated peptide
  VARIANT (1)..(17): Xaa = Any Amino Acid
ACEWCAXXXNXPACTGC

SEQ ID NO: 12919 - protein, 17 aa, Artificial Sequence
  Synthetically generated peptide
  VARIANT (1)..(17): Xaa = Any Amino Acid
ACEWCAXXXNPXACTGC

SEQ ID NO: 12920 - protein, 17 aa, Artificial Sequence
  Synthetically generated peptide
  VARIANT (1)..(17): Xaa = Any Amino Acid
ACEWCAXXXNPAXCTGC

SEQ ID NO: 12921 - protein, 17 aa, Artificial Sequence
  Synthetically generated peptide
  VARIANT (1)..(17): Xaa = Any Amino Acid
ACEWCAXXXNPACXTGC

SEQ ID NO: 12922 - protein, 17 aa, Artificial Sequence
  Synthetically generated peptide
  VARIANT (1)..(17): Xaa = Any Amino Acid
ACEWCAXXXNPACTXGC

SEQ ID NO: 12923 - protein, 17 aa, Artificial Sequence
  Synthetically generated peptide
  VARIANT (1)..(17): Xaa = Any Amino Acid
ACEWCAXXXNPACTGXC

SEQ ID NO: 12924 - protein, 16 aa, Artificial Sequence
  Synthetically generated peptide
  VARIANT (1)..(16): Xaa = Any Amino Acid
ACEWCAXXNXPACTGC

SEQ ID NO: 12925 - protein, 17 aa, Artificial Sequence
  Synthetically generated peptide
  VARIANT (1)..(17): Xaa = Any Amino Acid
ACEWCAXXNXXPACTGC

SEQ ID NO: 12926 - protein, 17 aa, Artificial Sequence
  Synthetically generated peptide
  VARIANT (1)..(17): Xaa = Any Amino Acid
ACEWCAXXNXPXACTGC

SEQ ID NO: 12927 - protein, 17 aa, Artificial Sequence
  Synthetically generated peptide
  VARIANT (1)..(17): Xaa = Any Amino Acid
ACEWCAXXNXPAXCTGC

SEQ ID NO: 12928 - protein, 17 aa, Artificial Sequence
  Synthetically generated peptide
  VARIANT (1)..(17): Xaa = Any Amino Acid
ACEWCAXXNXPACXTGC

SEQ ID NO: 12929 - protein, 17 aa, Artificial Sequence
  Synthetically generated peptide
  VARIANT (1)..(17): Xaa = Any Amino Acid
ACEWCAXXNXPACTXGC

SEQ ID NO: 12930 - protein, 17 aa, Artificial Sequence
  Synthetically generated peptide
  VARIANT (1)..(17): Xaa = Any Amino Acid
ACEWCAXXNXPACTGXC

SEQ ID NO: 12931 - protein, 16 aa, Artificial Sequence
  Synthetically generated peptide
  VARIANT (1)..(16): Xaa = Any Amino Acid
ACEWCAXXNPXACTGC

SEQ ID NO: 12932 - protein, 17 aa, Artificial Sequence
  Synthetically generated peptide
  VARIANT (1)..(17): Xaa = Any Amino Acid
ACEWCAXXNPXXACTGC

SEQ ID NO: 12933 - protein, 17 aa, Artificial Sequence
  Synthetically generated peptide
  VARIANT (1)..(17): Xaa = Any Amino Acid
ACEWCAXXNPXAXCTGC

SEQ ID NO: 12934 - protein, 17 aa, Artificial Sequence
  Synthetically generated peptide
  VARIANT (1)..(17): Xaa = Any Amino Acid
ACEWCAXXNPXACXTGC

SEQ ID NO: 12935 - protein, 17 aa, Artificial Sequence
  Synthetically generated peptide
  VARIANT (1)..(17): Xaa = Any Amino Acid
ACEWCAXXNPXACTXGC

SEQ ID NO: 12936 - protein, 17 aa, Artificial Sequence
  Synthetically generated peptide
  VARIANT (1)..(17): Xaa = Any Amino Acid
ACEWCAXXNPXACTGXC

SEQ ID NO: 12937 - protein, 16 aa, Artificial Sequence
  Synthetically generated peptide
  VARIANT (1)..(16): Xaa = Any Amino Acid
ACEWCAXXNPAXCTGC

SEQ ID NO: 12938 - protein, 17 aa, Artificial Sequence
  Synthetically generated peptide
  VARIANT (1)..(17): Xaa = Any Amino Acid
ACEWCAXXNPAXXCTGC

SEQ ID NO: 12939 - protein, 17 aa, Artificial Sequence
  Synthetically generated peptide
  VARIANT (1)..(17): Xaa = Any Amino Acid
ACEWCAXXNPAXCXTGC

SEQ ID NO: 12940 - protein, 17 aa, Artificial Sequence
  Synthetically generated peptide
  VARIANT (1)..(17): Xaa = Any Amino Acid
ACEWCAXXNPAXCTXGC

SEQ ID NO: 12941 - protein, 17 aa, Artificial Sequence
  Synthetically generated peptide
  VARIANT (1)..(17): Xaa = Any Amino Acid
ACEWCAXXNPAXCTGXC

SEQ ID NO: 12942 - protein, 16 aa, Artificial Sequence
  Synthetically generated peptide
  VARIANT (1)..(16): Xaa = Any Amino Acid
ACEWCAXXNPACXTGC

SEQ ID NO: 12943 - protein, 17 aa, Artificial Sequence
  Synthetically generated peptide
  VARIANT (1)..(17): Xaa = Any Amino Acid
ACEWCAXXNPACXXTGC

SEQ ID NO: 12944 - protein, 17 aa, Artificial Sequence
  Synthetically generated peptide
  VARIANT (1)..(17): Xaa = Any Amino Acid
ACEWCAXXNPACXTXGC

SEQ ID NO: 12945 - protein, 17 aa, Artificial Sequence
  Synthetically generated peptide
  VARIANT (1)..(17): Xaa = Any Amino Acid
ACEWCAXXNPACXTGXC

SEQ ID NO: 12946 - protein, 16 aa, Artificial Sequence
  Synthetically generated peptide
  VARIANT (1)..(16): Xaa = Any Amino Acid
ACEWCAXXNPACTXGC

SEQ ID NO: 12947 - protein, 17 aa, Artificial Sequence
  Synthetically generated peptide
  VARIANT (1)..(17): Xaa = Any Amino Acid
ACEWCAXXNPACTXXGC

SEQ ID NO: 12948 - protein, 17 aa, Artificial Sequence
  Synthetically generated peptide
  VARIANT (1)..(17): Xaa = Any Amino Acid
ACEWCAXXNPACTXGXC

SEQ ID NO: 12949 - protein, 16 aa, Artificial Sequence
  Synthetically generated peptide
  VARIANT (1)..(16): Xaa = Any Amino Acid
ACEWCAXXNPACTGXC

SEQ ID NO: 12950 - protein, 17 aa, Artificial Sequence
  Synthetically generated peptide
  VARIANT (1)..(17): Xaa = Any Amino Acid
ACEWCAXXNPACTGXXC

SEQ ID NO: 12951 - protein, 15 aa, Artificial Sequence
  Synthetically generated peptide
  VARIANT (1)..(15): Xaa = Any Amino Acid
ACEWCAXNXPACTGC

SEQ ID NO: 12952 - protein, 16 aa, Artificial Sequence
  Synthetically generated peptide
  VARIANT (1)..(16): Xaa = Any Amino Acid
ACEWCAXNXXPACTGC

SEQ ID NO: 12953 - protein, 17 aa, Artificial Sequence
  Synthetically generated peptide
  VARIANT (1)..(17): Xaa = Any Amino Acid
ACEWCAXNXXXPACTGC

SEQ ID NO: 12954 - protein, 17 aa, Artificial Sequence
  Synthetically generated peptide
  VARIANT (1)..(17): Xaa = Any Amino Acid
ACEWCAXNXXPXACTGC

SEQ ID NO: 12955 - protein, 17 aa, Artificial Sequence
  Synthetically generated peptide
  VARIANT (1)..(17): Xaa = Any Amino Acid
ACEWCAXNXXPAXCTGC

SEQ ID NO: 12956 - protein, 17 aa, Artificial Sequence
  Synthetically generated peptide
  VARIANT (1)..(17): Xaa = Any Amino Acid
ACEWCAXNXXPACXTGC

SEQ ID NO: 12957 - protein, 17 aa, Artificial Sequence
  Synthetically generated peptide
  VARIANT (1)..(17): Xaa = Any Amino Acid
ACEWCAXNXXPACTXGC

SEQ ID NO: 12958 - protein, 17 aa, Artificial Sequence
  Synthetically generated peptide
  VARIANT (1)..(17): Xaa = Any Amino Acid
ACEWCAXNXXPACTGXC

SEQ ID NO: 12959 - protein, 16 aa, Artificial Sequence
  Synthetically generated peptide
  VARIANT (1)..(16): Xaa = Any Amino Acid
ACEWCAXNXPXACTGC

SEQ ID NO: 12960 - protein, 17 aa, Artificial Sequence
  Synthetically generated peptide
  VARIANT (1)..(17): Xaa = Any Amino Acid
ACEWCAXNXPXXACTGC

SEQ ID NO: 12961 - protein, 17 aa, Artificial Sequence
  Synthetically generated peptide
  VARIANT (1)..(17): Xaa = Any Amino Acid
ACEWCAXNXPXAXCTGC

SEQ ID NO: 12962 - protein, 17 aa, Artificial Sequence
  Synthetically generated peptide
  VARIANT (1)..(17): Xaa = Any Amino Acid
ACEWCAXNXPXACXTGC

SEQ ID NO: 12963 - protein, 17 aa, Artificial Sequence
  Synthetically generated peptide
  VARIANT (1)..(17): Xaa = Any Amino Acid
ACEWCAXNXPXACTXGC

SEQ ID NO: 12964 - protein, 17 aa, Artificial Sequence
  Synthetically generated peptide
  VARIANT (1)..(17): Xaa = Any Amino Acid
ACEWCAXNXPXACTGXC

SEQ ID NO: 12965 - protein, 16 aa, Artificial Sequence
  Synthetically generated peptide
  VARIANT (1)..(16): Xaa = Any Amino Acid
ACEWCAXNXPAXCTGC

SEQ ID NO: 12966 - protein, 17 aa, Artificial Sequence
  Synthetically generated peptide
  VARIANT (1)..(17): Xaa = Any Amino Acid
ACEWCAXNXPAXXCTGC

SEQ ID NO: 12967 - protein, 17 aa, Artificial Sequence
  Synthetically generated peptide
  VARIANT (1)..(17): Xaa = Any Amino Acid
ACEWCAXNXPAXCXTGC

SEQ ID NO: 12968 - protein, 17 aa, Artificial Sequence
  Synthetically generated peptide
  VARIANT (1)..(17): Xaa = Any Amino Acid
ACEWCAXNXPAXCTXGC

SEQ ID NO: 12969 - protein, 17 aa, Artificial Sequence
  Synthetically generated peptide
  VARIANT (1)..(17): Xaa = Any Amino Acid
ACEWCAXNXPAXCTGXC

SEQ ID NO: 12970 - protein, 16 aa, Artificial Sequence
  Synthetically generated peptide
  VARIANT (1)..(16): Xaa = Any Amino Acid
ACEWCAXNXPACXTGC

SEQ ID NO: 12971 - protein, 17 aa, Artificial Sequence
  Synthetically generated peptide
  VARIANT (1)..(17): Xaa = Any Amino Acid
ACEWCAXNXPACXXTGC

SEQ ID NO: 12972 - protein, 17 aa, Artificial Sequence
  Synthetically generated peptide
  VARIANT (1)..(17): Xaa = Any Amino Acid
ACEWCAXNXPACXTXGC

SEQ ID NO: 12973 - protein, 17 aa, Artificial Sequence
  Synthetically generated peptide
  VARIANT (1)..(17): Xaa = Any Amino Acid
ACEWCAXNXPACXTGXC

SEQ ID NO: 12974 - protein, 16 aa, Artificial Sequence
  Synthetically generated peptide
  VARIANT (1)..(16): Xaa = Any Amino Acid
ACEWCAXNXPACTXGC

SEQ ID NO: 12975 - protein, 17 aa, Artificial Sequence
  Synthetically generated peptide
  VARIANT (1)..(17): Xaa = Any Amino Acid
ACEWCAXNXPACTXXGC

SEQ ID NO: 12976 - protein, 17 aa, Artificial Sequence
  Synthetically generated peptide
  VARIANT (1)..(17): Xaa = Any Amino Acid
ACEWCAXNXPACTXGXC

SEQ ID NO: 12977 - protein, 16 aa, Artificial Sequence
  Synthetically generated peptide
  VARIANT (1)..(16): Xaa = Any Amino Acid
ACEWCAXNXPACTGXC

SEQ ID NO: 12978 - protein, 17 aa, Artificial Sequence
  Synthetically generated peptide
  VARIANT (1)..(17): Xaa = Any Amino Acid
ACEWCAXNXPACTGXXC

SEQ ID NO: 12979 - protein, 15 aa, Artificial Sequence
  Synthetically generated peptide
  VARIANT (1)..(15): Xaa = Any Amino Acid
ACEWCAXNPXACTGC

SEQ ID NO: 12980 - protein, 16 aa, Artificial Sequence
  Synthetically generated peptide
  VARIANT (1)..(16): Xaa = Any Amino Acid
ACEWCAXNPXXACTGC

SEQ ID NO: 12981 - protein, 17 aa, Artificial Sequence
  Synthetically generated peptide
  VARIANT (1)..(17): Xaa = Any Amino Acid
ACEWCAXNPXXXACTGC

SEQ ID NO: 12982 - protein, 17 aa, Artificial Sequence
  Synthetically generated peptide
  VARIANT (1)..(17): Xaa = Any Amino Acid
ACEWCAXNPXXAXCTGC

SEQ ID NO: 12983 - protein, 17 aa, Artificial Sequence
  Synthetically generated peptide
  VARIANT (1)..(17): Xaa = Any Amino Acid
ACEWCAXNPXXACXTGC

SEQ ID NO: 12984 - protein, 17 aa, Artificial Sequence
  Synthetically generated peptide
  VARIANT (1)..(17): Xaa = Any Amino Acid
ACEWCAXNPXXACTXGC

SEQ ID NO: 12985 - protein, 17 aa, Artificial Sequence
  Synthetically generated peptide
  VARIANT (1)..(17): Xaa = Any Amino Acid
ACEWCAXNPXXACTGXC

SEQ ID NO: 12986 - protein, 16 aa, Artificial Sequence
  Synthetically generated peptide
  VARIANT (1)..(16): Xaa = Any Amino Acid
ACEWCAXNPXAXCTGC

SEQ ID NO: 12987 - protein, 17 aa, Artificial Sequence
  Synthetically generated peptide
  VARIANT (1)..(17): Xaa = Any Amino Acid
ACEWCAXNPXAXXCTGC

SEQ ID NO: 12988 - protein, 17 aa, Artificial Sequence
  Synthetically generated peptide
  VARIANT (1)..(17): Xaa = Any Amino Acid
ACEWCAXNPXAXCXTGC

SEQ ID NO: 12989 - protein, 17 aa, Artificial Sequence
  Synthetically generated peptide
  VARIANT (1)..(17): Xaa = Any Amino Acid
ACEWCAXNPXAXCTXGC

SEQ ID NO: 12990 - protein, 17 aa, Artificial Sequence
  Synthetically generated peptide
  VARIANT (1)..(17): Xaa = Any Amino Acid
ACEWCAXNPXAXCTGXC

SEQ ID NO: 12991 - protein, 16 aa, Artificial Sequence
  Synthetically generated peptide
  VARIANT (1)..(16): Xaa = Any Amino Acid
ACEWCAXNPXACXTGC

SEQ ID NO: 12992 - protein, 17 aa, Artificial Sequence
  Synthetically generated peptide
  VARIANT (1)..(17): Xaa = Any Amino Acid
ACEWCAXNPXACXXTGC

SEQ ID NO: 12993 - protein, 17 aa, Artificial Sequence
  Synthetically generated peptide
  VARIANT (1)..(17): Xaa = Any Amino Acid
ACEWCAXNPXACXTXGC

SEQ ID NO: 12994 - protein, 17 aa, Artificial Sequence
  Synthetically generated peptide
  VARIANT (1)..(17): Xaa = Any Amino Acid
ACEWCAXNPXACXTGXC

SEQ ID NO: 12995 - protein, 16 aa, Artificial Sequence
  Synthetically generated peptide
  VARIANT (1)..(16): Xaa = Any Amino Acid
ACEWCAXNPXACTXGC

SEQ ID NO: 12996 - protein, 17 aa, Artificial Sequence
  Synthetically generated peptide
  VARIANT (1)..(17): Xaa = Any Amino Acid
ACEWCAXNPXACTXXGC

SEQ ID NO: 12997 - protein, 17 aa, Artificial Sequence
  Synthetically generated peptide
  VARIANT (1)..(17): Xaa = Any Amino Acid
ACEWCAXNPXACTXGXC

SEQ ID NO: 12998 - protein, 16 aa, Artificial Sequence
  Synthetically generated peptide
  VARIANT (1)..(16): Xaa = Any Amino Acid
ACEWCAXNPXACTGXC

SEQ ID NO: 12999 - protein, 17 aa, Artificial Sequence
  Synthetically generated peptide
  VARIANT (1)..(17): Xaa = Any Amino Acid
ACEWCAXNPXACTGXXC

SEQ ID NO: 13000 - protein, 15 aa, Artificial Sequence
  Synthetically generated peptide
  VARIANT (1)..(15): Xaa = Any Amino Acid
ACEWCAXNPAXCTGC

SEQ ID NO: 13001 - protein, 16 aa, Artificial Sequence
  Synthetically generated peptide
  VARIANT (1)..(16): Xaa = Any Amino Acid
ACEWCAXNPAXXCTGC

SEQ ID NO: 13002 - protein, 17 aa, Artificial Sequence
  Synthetically generated peptide
  VARIANT (1)..(17): Xaa = Any Amino Acid
ACEWCAXNPAXXXCTGC

SEQ ID NO: 13003 - protein, 17 aa, Artificial Sequence
  Synthetically generated peptide
  VARIANT (1)..(17): Xaa = Any Amino Acid
ACEWCAXNPAXXCXTGC

SEQ ID NO: 13004 - protein, 17 aa, Artificial Sequence
  Synthetically generated peptide
  VARIANT (1)..(17): Xaa = Any Amino Acid
ACEWCAXNPAXXCTXGC

SEQ ID NO: 13005 - protein, 17 aa, Artificial Sequence
  Synthetically generated peptide
  VARIANT (1)..(17): Xaa = Any Amino Acid
ACEWCAXNPAXXCTGXC

SEQ ID NO: 13006 - protein, 16 aa, Artificial Sequence
  Synthetically generated peptide
  VARIANT (1)..(16): Xaa = Any Amino Acid
ACEWCAXNPAXCXTGC

SEQ ID NO: 13007 - protein, 17 aa, Artificial Sequence
  Synthetically generated peptide
  VARIANT (1)..(17): Xaa = Any Amino Acid
ACEWCAXNPAXCXXTGC

SEQ ID NO: 13008 - protein, 17 aa, Artificial Sequence
  Synthetically generated peptide
  VARIANT (1)..(17): Xaa = Any Amino Acid
ACEWCAXNPAXCXTXGC

SEQ ID NO: 13009 - protein, 17 aa, Artificial Sequence
  Synthetically generated peptide
  VARIANT (1)..(17): Xaa = Any Amino Acid
ACEWCAXNPAXCXTGXC

SEQ ID NO: 13010 - protein, 16 aa, Artificial Sequence
  Synthetically generated peptide
  VARIANT (1)..(16): Xaa = Any Amino Acid
ACEWCAXNPAXCTXGC

SEQ ID NO: 13011 - protein, 17 aa, Artificial Sequence
  Synthetically generated peptide
  VARIANT (1)..(17): Xaa = Any Amino Acid
ACEWCAXNPAXCTXXGC

SEQ ID NO: 13012 - protein, 17 aa, Artificial Sequence
  Synthetically generated peptide
  VARIANT (1)..(17): Xaa = Any Amino Acid
ACEWCAXNPAXCTXGXC

SEQ ID NO: 13013 - protein, 16 aa, Artificial Sequence
  Synthetically generated peptide
  VARIANT (1)..(16): Xaa = Any Amino Acid
ACEWCAXNPAXCTGXC

SEQ ID NO: 13014 - protein, 17 aa, Artificial Sequence
  Synthetically generated peptide
  VARIANT (1)..(17): Xaa = Any Amino Acid
ACEWCAXNPAXCTGXXC

SEQ ID NO: 13015 - protein, 15 aa, Artificial Sequence
  Synthetically generated peptide
  VARIANT (1)..(15): Xaa = Any Amino Acid
ACEWCAXNPACXTGC

SEQ ID NO: 13016 - protein, 16 aa, Artificial Sequence
  Synthetically generated peptide
  VARIANT (1)..(16): Xaa = Any Amino Acid
ACEWCAXNPACXXTGC

SEQ ID NO: 13017 - protein, 17 aa, Artificial Sequence
  Synthetically generated peptide
  VARIANT (1)..(17): Xaa = Any Amino Acid
ACEWCAXNPACXXXTGC

SEQ ID NO: 13018 - protein, 17 aa, Artificial Sequence
  Synthetically generated peptide
  VARIANT (1)..(17): Xaa = Any Amino Acid
ACEWCAXNPACXXTXGC

SEQ ID NO: 13019 - protein, 17 aa, Artificial Sequence
  Synthetically generated peptide
  VARIANT (1)..(17): Xaa = Any Amino Acid
ACEWCAXNPACXXTGXC

SEQ ID NO: 13020 - protein, 16 aa, Artificial Sequence
  Synthetically generated peptide
  VARIANT (1)..(16): Xaa = Any Amino Acid
ACEWCAXNPACXTXGC

SEQ ID NO: 13021 - protein, 17 aa, Artificial Sequence
  Synthetically generated peptide
  VARIANT (1)..(17): Xaa = Any Amino Acid
ACEWCAXNPACXTXXGC

SEQ ID NO: 13022 - protein, 17 aa, Artificial Sequence
  Synthetically generated peptide
  VARIANT (1)..(17): Xaa = Any Amino Acid
ACEWCAXNPACXTXGXC

SEQ ID NO: 13023 - protein, 16 aa, Artificial Sequence
  Synthetically generated peptide
  VARIANT (1)..(16): Xaa = Any Amino Acid
ACEWCAXNPACXTGXC

SEQ ID NO: 13024 - protein, 17 aa, Artificial Sequence
  Synthetically generated peptide
  VARIANT (1)..(17): Xaa = Any Amino Acid
ACEWCAXNPACXTGXXC

SEQ ID NO: 13025 - protein, 15 aa, Artificial Sequence
  Synthetically generated peptide
  VARIANT (1)..(15): Xaa = Any Amino Acid
ACEWCAXNPACTXGC

SEQ ID NO: 13026 - protein, 16 aa, Artificial Sequence
  Synthetically generated peptide
  VARIANT (1)..(16): Xaa = Any Amino Acid
ACEWCAXNPACTXXGC

SEQ ID NO: 13027 - protein, 17 aa, Artificial Sequence
  Synthetically generated peptide
  VARIANT (1)..(17): Xaa = Any Amino Acid
ACEWCAXNPACTXXXGC

SEQ ID NO: 13028 - protein, 17 aa, Artificial Sequence
  Synthetically generated peptide
  VARIANT (1)..(17): Xaa = Any Amino Acid
ACEWCAXNPACTXXGXC

SEQ ID NO: 13029 - protein, 16 aa, Artificial Sequence
  Synthetically generated peptide
  VARIANT (1)..(16): Xaa = Any Amino Acid
ACEWCAXNPACTXGXC

SEQ ID NO: 13030 - protein, 17 aa, Artificial Sequence
  Synthetically generated peptide
  VARIANT (1)..(17): Xaa = Any Amino Acid
ACEWCAXNPACTXGXXC

SEQ ID NO: 13031 - protein, 15 aa, Artificial Sequence
  Synthetically generated peptide
  VARIANT (1)..(15): Xaa = Any Amino Acid
ACEWCAXNPACTGXC

SEQ ID NO: 13032 - protein, 16 aa, Artificial Sequence
  Synthetically generated peptide
  VARIANT (1)..(16): Xaa = Any Amino Acid
ACEWCAXNPACTGXXC

SEQ ID NO: 13033 - protein, 17 aa, Artificial Sequence
  Synthetically generated peptide
  VARIANT (1)..(17): Xaa = Any Amino Acid
ACEWCAXNPACTGXXXC

SEQ ID NO: 13034 - protein, 14 aa, Artificial Sequence
  Synthetically generated peptide
  VARIANT (1)..(14): Xaa = Any Amino Acid
ACEWCANXPACTGC

SEQ ID NO: 13035 - protein, 15 aa, Artificial Sequence
  Synthetically generated peptide
  VARIANT (1)..(15): Xaa = Any Amino Acid
ACEWCANXXPACTGC

SEQ ID NO: 13036 - protein, 16 aa, Artificial Sequence
  Synthetically generated peptide
  VARIANT (1)..(16): Xaa = Any Amino Acid
ACEWCANXXXPACTGC

SEQ ID NO: 13037 - protein, 17 aa, Artificial Sequence
  Synthetically generated peptide
  VARIANT (1)..(17): Xaa = Any Amino Acid
ACEWCANXXXXPACTGC

SEQ ID NO: 13038 - protein, 17 aa, Artificial Sequence
  Synthetically generated peptide
  VARIANT (1)..(17): Xaa = Any Amino Acid
ACEWCANXXXPXACTGC

SEQ ID NO: 13039 - protein, 17 aa, Artificial Sequence
  Synthetically generated peptide
  VARIANT (1)..(17): Xaa = Any Amino Acid
ACEWCANXXXPAXCTGC

SEQ ID NO: 13040 - protein, 17 aa, Artificial Sequence
  Synthetically generated peptide
  VARIANT (1)..(17): Xaa = Any Amino Acid
ACEWCANXXXPACXTGC

SEQ ID NO: 13041 - protein, 17 aa, Artificial Sequence
  Synthetically generated peptide
  VARIANT (1)..(17): Xaa = Any Amino Acid
ACEWCANXXXPACTXGC

SEQ ID NO: 13042 - protein, 17 aa, Artificial Sequence
  Synthetically generated peptide
  VARIANT (1)..(17): Xaa = Any Amino Acid
ACEWCANXXXPACTGXC

SEQ ID NO: 13043 - protein, 16 aa, Artificial Sequence
  Synthetically generated peptide
  VARIANT (1)..(16): Xaa = Any Amino Acid
ACEWCANXXPXACTGC

SEQ ID NO: 13044 - protein, 17 aa, Artificial Sequence
  Synthetically generated peptide
  VARIANT (1)..(17): Xaa = Any Amino Acid
ACEWCANXXPXXACTGC

SEQ ID NO: 13045 - protein, 17 aa, Artificial Sequence
  Synthetically generated peptide
  VARIANT (1)..(17): Xaa = Any Amino Acid
ACEWCANXXPXAXCTGC

SEQ ID NO: 13046 - protein, 17 aa, Artificial Sequence
  Synthetically generated peptide
  VARIANT (1)..(17): Xaa = Any Amino Acid
ACEWCANXXPXACXTGC

SEQ ID NO: 13047 - protein, 17 aa, Artificial Sequence
  Synthetically generated peptide
  VARIANT (1)..(17): Xaa = Any Amino Acid
ACEWCANXXPXACTXGC

SEQ ID NO: 13048 - protein, 17 aa, Artificial Sequence
  Synthetically generated peptide
  VARIANT (1)..(17): Xaa = Any Amino Acid
ACEWCANXXPXACTGXC

SEQ ID NO: 13049 - protein, 16 aa, Artificial Sequence
  Synthetically generated peptide
  VARIANT (1)..(16): Xaa = Any Amino Acid
ACEWCANXXPAXCTGC

SEQ ID NO: 13050 - protein, 17 aa, Artificial Sequence
  Synthetically generated peptide
  VARIANT (1)..(17): Xaa = Any Amino Acid
ACEWCANXXPAXXCTGC

SEQ ID NO: 13051 - protein, 17 aa, Artificial Sequence
  Synthetically generated peptide
  VARIANT (1)..(17): Xaa = Any Amino Acid
ACEWCANXXPAXCXTGC

SEQ ID NO: 13052 - protein, 17 aa, Artificial Sequence
  Synthetically generated peptide
  VARIANT (1)..(17): Xaa = Any Amino Acid
ACEWCANXXPAXCTXGC

SEQ ID NO: 13053 - protein, 17 aa, Artificial Sequence
  Synthetically generated peptide
  VARIANT (1)..(17): Xaa = Any Amino Acid
ACEWCANXXPAXCTGXC

SEQ ID NO: 13054 - protein, 16 aa, Artificial Sequence
  Synthetically generated peptide
  VARIANT (1)..(16): Xaa = Any Amino Acid
ACEWCANXXPACXTGC

SEQ ID NO: 13055 - protein, 17 aa, Artificial Sequence
  Synthetically generated peptide
  VARIANT (1)..(17): Xaa = Any Amino Acid
ACEWCANXXPACXXTGC

SEQ ID NO: 13056 - protein, 17 aa, Artificial Sequence
  Synthetically generated peptide
  VARIANT (1)..(17): Xaa = Any Amino Acid
ACEWCANXXPACXTXGC

SEQ ID NO: 13057 - protein, 17 aa, Artificial Sequence
  Synthetically generated peptide
  VARIANT (1)..(17): Xaa = Any Amino Acid
ACEWCANXXPACXTGXC

SEQ ID NO: 13058 - protein, 16 aa, Artificial Sequence
  Synthetically generated peptide
  VARIANT (1)..(16): Xaa = Any Amino Acid
ACEWCANXXPACTXGC

SEQ ID NO: 13059 - protein, 17 aa, Artificial Sequence
  Synthetically generated peptide
  VARIANT (1)..(17): Xaa = Any Amino Acid
ACEWCANXXPACTXXGC

SEQ ID NO: 13060 - protein, 17 aa, Artificial Sequence
  Synthetically generated peptide
  VARIANT (1)..(17): Xaa = Any Amino Acid
ACEWCANXXPACTXGXC

SEQ ID NO: 13061 - protein, 16 aa, Artificial Sequence
  Synthetically generated peptide
  VARIANT (1)..(16): Xaa = Any Amino Acid
ACEWCANXXPACTGXC

SEQ ID NO: 13062 - protein, 17 aa, Artificial Sequence
  Synthetically generated peptide
  VARIANT (1)..(17): Xaa = Any Amino Acid
ACEWCANXXPACTGXXC

SEQ ID NO: 13063 - protein, 15 aa, Artificial Sequence
  Synthetically generated peptide
  VARIANT (1)..(15): Xaa = Any Amino Acid
ACEWCANXPXACTGC

SEQ ID NO: 13064 - protein, 16 aa, Artificial Sequence
  Synthetically generated peptide
  VARIANT (1)..(16): Xaa = Any Amino Acid
ACEWCANXPXXACTGC

SEQ ID NO: 13065 - protein, 17 aa, Artificial Sequence
  Synthetically generated peptide
  VARIANT (1)..(17): Xaa = Any Amino Acid
ACEWCANXPXXXACTGC

SEQ ID NO: 13066 - protein, 17 aa, Artificial Sequence
  Synthetically generated peptide
  VARIANT (1)..(17): Xaa = Any Amino Acid
ACEWCANXPXXAXCTGC

SEQ ID NO: 13067 - protein, 17 aa, Artificial Sequence
  Synthetically generated peptide
  VARIANT (1)..(17): Xaa = Any Amino Acid
ACEWCANXPXXACXTGC

SEQ ID NO: 13068 - protein, 17 aa, Artificial Sequence
  Synthetically generated peptide
  VARIANT (1)..(17): Xaa = Any Amino Acid
ACEWCANXPXXACTXGC

SEQ ID NO: 13069 - protein, 17 aa, Artificial Sequence
  Synthetically generated peptide
  VARIANT (1)..(17): Xaa = Any Amino Acid
ACEWCANXPXXACTGXC

SEQ ID NO: 13070 - protein, 16 aa, Artificial Sequence
  Synthetically generated peptide
  VARIANT (1)..(16): Xaa = Any Amino Acid
ACEWCANXPXAXCTGC

SEQ ID NO: 13071 - protein, 17 aa, Artificial Sequence
  Synthetically generated peptide
  VARIANT (1)..(17): Xaa = Any Amino Acid
ACEWCANXPXAXXCTGC

SEQ ID NO: 13072 - protein, 17 aa, Artificial Sequence
  Synthetically generated peptide
  VARIANT (1)..(17): Xaa = Any Amino Acid
ACEWCANXPXAXCXTGC

SEQ ID NO: 13073 - protein, 17 aa, Artificial Sequence
  Synthetically generated peptide
  VARIANT (1)..(17): Xaa = Any Amino Acid
ACEWCANXPXAXCTXGC

SEQ ID NO: 13074 - protein, 17 aa, Artificial Sequence
  Synthetically generated peptide
  VARIANT (1)..(17): Xaa = Any Amino Acid
ACEWCANXPXAXCTGXC

SEQ ID NO: 13075 - protein, 16 aa, Artificial Sequence
  Synthetically generated peptide
  VARIANT (1)..(16): Xaa = Any Amino Acid
ACEWCANXPXACXTGC

SEQ ID NO: 13076 - protein, 17 aa, Artificial Sequence
  Synthetically generated peptide
  VARIANT (1)..(17): Xaa = Any Amino Acid
ACEWCANXPXACXXTGC

SEQ ID NO: 13077 - protein, 17 aa, Artificial Sequence
  Synthetically generated peptide
  VARIANT (1)..(17): Xaa = Any Amino Acid
ACEWCANXPXACXTXGC

SEQ ID NO: 13078 - protein, 17 aa, Artificial Sequence
  Synthetically generated peptide
  VARIANT (1)..(17): Xaa = Any Amino Acid
ACEWCANXPXACXTGXC

SEQ ID NO: 13079 - protein, 16 aa, Artificial Sequence
  Synthetically generated peptide
  VARIANT (1)..(16): Xaa = Any Amino Acid
ACEWCANXPXACTXGC

SEQ ID NO: 13080 - protein, 17 aa, Artificial Sequence
  Synthetically generated peptide
  VARIANT (1)..(17): Xaa = Any Amino Acid
ACEWCANXPXACTXXGC

SEQ ID NO: 13081 - protein, 17 aa, Artificial Sequence
  Synthetically generated peptide
  VARIANT (1)..(17): Xaa = Any Amino Acid
ACEWCANXPXACTXGXC

SEQ ID NO: 13082 - protein, 16 aa, Artificial Sequence
  Synthetically generated peptide
  VARIANT (1)..(16): Xaa = Any Amino Acid
ACEWCANXPXACTGXC

SEQ ID NO: 13083 - protein, 17 aa, Artificial Sequence
  Synthetically generated peptide
  VARIANT (1)..(17): Xaa = Any Amino Acid
ACEWCANXPXACTGXXC

SEQ ID NO: 13084 - protein, 15 aa, Artificial Sequence
  Synthetically generated peptide
  VARIANT (1)..(15): Xaa = Any Amino Acid
ACEWCANXPAXCTGC

SEQ ID NO: 13085 - protein, 16 aa, Artificial Sequence
  Synthetically generated peptide
  VARIANT (1)..(16): Xaa = Any Amino Acid
ACEWCANXPAXXCTGC

SEQ ID NO: 13086 - protein, 17 aa, Artificial Sequence
  Synthetically generated peptide
  VARIANT (1)..(17): Xaa = Any Amino Acid
ACEWCANXPAXXXCTGC

SEQ ID NO: 13087 - protein, 17 aa, Artificial Sequence
  Synthetically generated peptide
  VARIANT (1)..(17): Xaa = Any Amino Acid
ACEWCANXPAXXCXTGC

SEQ ID NO: 13088 - protein, 17 aa, Artificial Sequence
  Synthetically generated peptide
  VARIANT (1)..(17): Xaa = Any Amino Acid
ACEWCANXPAXXCTXGC

SEQ ID NO: 13089 - protein, 17 aa, Artificial Sequence
  Synthetically generated peptide
  VARIANT (1)..(17): Xaa = Any Amino Acid
ACEWCANXPAXXCTGXC

SEQ ID NO: 13090 - protein, 16 aa, Artificial Sequence
  Synthetically generated peptide
  VARIANT (1)..(16): Xaa = Any Amino Acid
ACEWCANXPAXCXTGC

SEQ ID NO: 13091 - protein, 17 aa, Artificial Sequence
  Synthetically generated peptide
  VARIANT (1)..(17): Xaa = Any Amino Acid
ACEWCANXPAXCXXTGC

SEQ ID NO: 13092 - protein, 17 aa, Artificial Sequence
  Synthetically generated peptide
  VARIANT (1)..(17): Xaa = Any Amino Acid
ACEWCANXPAXCXTXGC

SEQ ID NO: 13093 - protein, 17 aa, Artificial Sequence
  Synthetically generated peptide
  VARIANT (1)..(17): Xaa = Any Amino Acid
ACEWCANXPAXCXTGXC

SEQ ID NO: 13094 - protein, 16 aa, Artificial Sequence
  Synthetically generated peptide
  VARIANT (1)..(16): Xaa = Any Amino Acid
ACEWCANXPAXCTXGC

SEQ ID NO: 13095 - protein, 17 aa, Artificial Sequence
  Synthetically generated peptide
  VARIANT (1)..(17): Xaa = Any Amino Acid
ACEWCANXPAXCTXXGC

SEQ ID NO: 13096 - protein, 17 aa, Artificial Sequence
  Synthetically generated peptide
  VARIANT (1)..(17): Xaa = Any Amino Acid
ACEWCANXPAXCTXGXC

SEQ ID NO: 13097 - protein, 16 aa, Artificial Sequence
  Synthetically generated peptide
  VARIANT (1)..(16): Xaa = Any Amino Acid
ACEWCANXPAXCTGXC

SEQ ID NO: 13098 - protein, 17 aa, Artificial Sequence
  Synthetically generated peptide
  VARIANT (1)..(17): Xaa = Any Amino Acid
ACEWCANXPAXCTGXXC

SEQ ID NO: 13099 - protein, 15 aa, Artificial Sequence
  Synthetically generated peptide
  VARIANT (1)..(15): Xaa = Any Amino Acid
ACEWCANXPACXTGC

SEQ ID NO: 13100 - protein, 16 aa, Artificial Sequence
  Synthetically generated peptide
  VARIANT (1)..(16): Xaa = Any Amino Acid
ACEWCANXPACXXTGC

SEQ ID NO: 13101 - protein, 17 aa, Artificial Sequence
  Synthetically generated peptide
  VARIANT (1)..(17): Xaa = Any Amino Acid
ACEWCANXPACXXXTGC

SEQ ID NO: 13102 - protein, 17 aa, Artificial Sequence
  Synthetically generated peptide
  VARIANT (1)..(17): Xaa = Any Amino Acid
ACEWCANXPACXXTXGC

SEQ ID NO: 13103 - protein, 17 aa, Artificial Sequence
  Synthetically generated peptide
  VARIANT (1)..(17): Xaa = Any Amino Acid
ACEWCANXPACXXTGXC

SEQ ID NO: 13104 - protein, 16 aa, Artificial Sequence
  Synthetically generated peptide
  VARIANT (1)..(16): Xaa = Any Amino Acid
ACEWCANXPACXTXGC

SEQ ID NO: 13105 - protein, 17 aa, Artificial Sequence
  Synthetically generated peptide
  VARIANT (1)..(17): Xaa = Any Amino Acid
ACEWCANXPACXTXXGC

SEQ ID NO: 13106 - protein, 17 aa, Artificial Sequence
  Synthetically generated peptide
  VARIANT (1)..(17): Xaa = Any Amino Acid
ACEWCANXPACXTXGXC

SEQ ID NO: 13107 - protein, 16 aa, Artificial Sequence
  Synthetically generated peptide
  VARIANT (1)..(16): Xaa = Any Amino Acid
ACEWCANXPACXTGXC

SEQ ID NO: 13108 - protein, 17 aa, Artificial Sequence
  Synthetically generated peptide
  VARIANT (1)..(17): Xaa = Any Amino Acid
ACEWCANXPACXTGXXC

SEQ ID NO: 13109 - protein, 15 aa, Artificial Sequence
  Synthetically generated peptide
  VARIANT (1)..(15): Xaa = Any Amino Acid
ACEWCANXPACTXGC

SEQ ID NO: 13110 - protein, 16 aa, Artificial Sequence
  Synthetically generated peptide
  VARIANT (1)..(16): Xaa = Any Amino Acid
ACEWCANXPACTXXGC

SEQ ID NO: 13111 - protein, 17 aa, Artificial Sequence
  Synthetically generated peptide
  VARIANT (1)..(17): Xaa = Any Amino Acid
ACEWCANXPACTXXXGC

SEQ ID NO: 13112 - protein, 17 aa, Artificial Sequence
  Synthetically generated peptide
  VARIANT (1)..(17): Xaa = Any Amino Acid
ACEWCANXPACTXXGXC

SEQ ID NO: 13113 - protein, 16 aa, Artificial Sequence
  Synthetically generated peptide
  VARIANT (1)..(16): Xaa = Any Amino Acid
ACEWCANXPACTXGXC

SEQ ID NO: 13114 - protein, 17 aa, Artificial Sequence
  Synthetically generated peptide
  VARIANT (1)..(17): Xaa = Any Amino Acid
ACEWCANXPACTXGXXC

SEQ ID NO: 13115 - protein, 15 aa, Artificial Sequence
  Synthetically generated peptide
  VARIANT (1)..(15): Xaa = Any Amino Acid
ACEWCANXPACTGXC

SEQ ID NO: 13116 - protein, 16 aa, Artificial Sequence
  Synthetically generated peptide
  VARIANT (1)..(16): Xaa = Any Amino Acid
ACEWCANXPACTGXXC

SEQ ID NO: 13117 - protein, 17 aa, Artificial Sequence
  Synthetically generated peptide
  VARIANT (1)..(17): Xaa = Any Amino Acid
ACEWCANXPACTGXXXC

SEQ ID NO: 13118 - protein, 14 aa, Artificial Sequence
  Synthetically generated peptide
  VARIANT (1)..(14): Xaa = Any Amino Acid
ACEWCANPXACTGC

SEQ ID NO: 13119 - protein, 15 aa, Artificial Sequence
  Synthetically generated peptide
  VARIANT (1)..(15): Xaa = Any Amino Acid
ACEWCANPXXACTGC

SEQ ID NO: 13120 - protein, 16 aa, Artificial Sequence
  Synthetically generated peptide
  VARIANT (1)..(16): Xaa = Any Amino Acid
ACEWCANPXXXACTGC

SEQ ID NO: 13121 - protein, 17 aa, Artificial Sequence
  Synthetically generated peptide
  VARIANT (1)..(17): Xaa = Any Amino Acid
ACEWCANPXXXXACTGC

SEQ ID NO: 13122 - protein, 17 aa, Artificial Sequence
  Synthetically generated peptide
  VARIANT (1)..(17): Xaa = Any Amino Acid
ACEWCANPXXXAXCTGC

SEQ ID NO: 13123 - protein, 17 aa, Artificial Sequence
  Synthetically generated peptide
  VARIANT (1)..(17): Xaa = Any Amino Acid
ACEWCANPXXXACXTGC

SEQ ID NO: 13124 - protein, 17 aa, Artificial Sequence
  Synthetically generated peptide
  VARIANT (1)..(17): Xaa = Any Amino Acid
ACEWCANPXXXACTXGC

SEQ ID NO: 13125 - protein, 17 aa, Artificial Sequence
  Synthetically generated peptide
  VARIANT (1)..(17): Xaa = Any Amino Acid
ACEWCANPXXXACTGXC

SEQ ID NO: 13126 - protein, 16 aa, Artificial Sequence
  Synthetically generated peptide
  VARIANT (1)..(16): Xaa = Any Amino Acid
ACEWCANPXXAXCTGC

SEQ ID NO: 13127 - protein, 17 aa, Artificial Sequence
  Synthetically generated peptide
  VARIANT (1)..(17): Xaa = Any Amino Acid
ACEWCANPXXAXXCTGC

SEQ ID NO: 13128 - protein, 17 aa, Artificial Sequence
  Synthetically generated peptide
  VARIANT (1)..(17): Xaa = Any Amino Acid
ACEWCANPXXAXCXTGC

SEQ ID NO: 13129 - protein, 17 aa, Artificial Sequence
  Synthetically generated peptide
  VARIANT (1)..(17): Xaa = Any Amino Acid
ACEWCANPXXAXCTXGC

SEQ ID NO: 13130 - protein, 17 aa, Artificial Sequence
  Synthetically generated peptide
  VARIANT (1)..(17): Xaa = Any Amino Acid
ACEWCANPXXAXCTGXC

SEQ ID NO: 13131 - protein, 16 aa, Artificial Sequence
  Synthetically generated peptide
  VARIANT (1)..(16): Xaa = Any Amino Acid
ACEWCANPXXACXTGC

SEQ ID NO: 13132 - protein, 17 aa, Artificial Sequence
  Synthetically generated peptide
  VARIANT (1)..(17): Xaa = Any Amino Acid
ACEWCANPXXACXXTGC

SEQ ID NO: 13133 - protein, 17 aa, Artificial Sequence
  Synthetically generated peptide
  VARIANT (1)..(17): Xaa = Any Amino Acid
ACEWCANPXXACXTXGC

SEQ ID NO: 13134 - protein, 17 aa, Artificial Sequence
  Synthetically generated peptide
  VARIANT (1)..(17): Xaa = Any Amino Acid
ACEWCANPXXACXTGXC

SEQ ID NO: 13135 - protein, 16 aa, Artificial Sequence
  Synthetically generated peptide
  VARIANT (1)..(16): Xaa = Any Amino Acid
ACEWCANPXXACTXGC

SEQ ID NO: 13136 - protein, 17 aa, Artificial Sequence
  Synthetically generated peptide
  VARIANT (1)..(17): Xaa = Any Amino Acid
ACEWCANPXXACTXXGC

SEQ ID NO: 13137 - protein, 17 aa, Artificial Sequence
  Synthetically generated peptide
  VARIANT (1)..(17): Xaa = Any Amino Acid
ACEWCANPXXACTXGXC

SEQ ID NO: 13138 - protein, 16 aa, Artificial Sequence
  Synthetically generated peptide
  VARIANT (1)..(16): Xaa = Any Amino Acid
ACEWCANPXXACTGXC

SEQ ID NO: 13139 - protein, 17 aa, Artificial Sequence
  Synthetically generated peptide
  VARIANT (1)..(17): Xaa = Any Amino Acid
ACEWCANPXXACTGXXC

SEQ ID NO: 13140 - protein, 15 aa, Artificial Sequence
  Synthetically generated peptide
  VARIANT (1)..(15): Xaa = Any Amino Acid
ACEWCANPXAXCTGC

SEQ ID NO: 13141 - protein, 16 aa, Artificial Sequence
  Synthetically generated peptide
  VARIANT (1)..(16): Xaa = Any Amino Acid
ACEWCANPXAXXCTGC

SEQ ID NO: 13142 - protein, 17 aa, Artificial Sequence
  Synthetically generated peptide
  VARIANT (1)..(17): Xaa = Any Amino Acid
ACEWCANPXAXXXCTGC

SEQ ID NO: 13143 - protein, 17 aa, Artificial Sequence
  Synthetically generated peptide
  VARIANT (1)..(17): Xaa = Any Amino Acid
ACEWCANPXAXXCXTGC

SEQ ID NO: 13144 - protein, 17 aa, Artificial Sequence
  Synthetically generated peptide
  VARIANT (1)..(17): Xaa = Any Amino Acid
ACEWCANPXAXXCTXGC

SEQ ID NO: 13145 - protein, 17 aa, Artificial Sequence
  Synthetically generated peptide
  VARIANT (1)..(17): Xaa = Any Amino Acid
ACEWCANPXAXXCTGXC

SEQ ID NO: 13146 - protein, 16 aa, Artificial Sequence
  Synthetically generated peptide
  VARIANT (1)..(16): Xaa = Any Amino Acid
ACEWCANPXAXCXTGC

SEQ ID NO: 13147 - protein, 17 aa, Artificial Sequence
  Synthetically generated peptide
  VARIANT (1)..(17): Xaa = Any Amino Acid
ACEWCANPXAXCXXTGC

SEQ ID NO: 13148 - protein, 17 aa, Artificial Sequence
  Synthetically generated peptide
  VARIANT (1)..(17): Xaa = Any Amino Acid
ACEWCANPXAXCXTXGC

SEQ ID NO: 13149 - protein, 17 aa, Artificial Sequence
  Synthetically generated peptide
  VARIANT (1)..(17): Xaa = Any Amino Acid
ACEWCANPXAXCXTGXC

SEQ ID NO: 13150 - protein, 16 aa, Artificial Sequence
  Synthetically generated peptide
  VARIANT (1)..(16): Xaa = Any Amino Acid
ACEWCANPXAXCTXGC

SEQ ID NO: 13151 - protein, 17 aa, Artificial Sequence
  Synthetically generated peptide
  VARIANT (1)..(17): Xaa = Any Amino Acid
ACEWCANPXAXCTXXGC

SEQ ID NO: 13152 - protein, 17 aa, Artificial Sequence
  Synthetically generated peptide
  VARIANT (1)..(17): Xaa = Any Amino Acid
ACEWCANPXAXCTXGXC

SEQ ID NO: 13153 - protein, 16 aa, Artificial Sequence
  Synthetically generated peptide
  VARIANT (1)..(16): Xaa = Any Amino Acid
ACEWCANPXAXCTGXC

SEQ ID NO: 13154 - protein, 17 aa, Artificial Sequence
  Synthetically generated peptide
  VARIANT (1)..(17): Xaa = Any Amino Acid
ACEWCANPXAXCTGXXC

SEQ ID NO: 13155 - protein, 15 aa, Artificial Sequence
  Synthetically generated peptide
  VARIANT (1)..(15): Xaa = Any Amino Acid
ACEWCANPXACXTGC

SEQ ID NO: 13156 - protein, 16 aa, Artificial Sequence
  Synthetically generated peptide
  VARIANT (1)..(16): Xaa = Any Amino Acid
ACEWCANPXACXXTGC

SEQ ID NO: 13157 - protein, 17 aa, Artificial Sequence
  Synthetically generated peptide
  VARIANT (1)..(17): Xaa = Any Amino Acid
ACEWCANPXACXXXTGC

SEQ ID NO: 13158 - protein, 17 aa, Artificial Sequence
  Synthetically generated peptide
  VARIANT (1)..(17): Xaa = Any Amino Acid
ACEWCANPXACXXTXGC

SEQ ID NO: 13159 - protein, 17 aa, Artificial Sequence
  Synthetically generated peptide
  VARIANT (1)..(17): Xaa = Any Amino Acid
ACEWCANPXACXXTGXC

SEQ ID NO: 13160 - protein, 16 aa, Artificial Sequence
  Synthetically generated peptide
  VARIANT (1)..(16): Xaa = Any Amino Acid
ACEWCANPXACXTXGC

SEQ ID NO: 13161 - protein, 17 aa, Artificial Sequence
  Synthetically generated peptide
  VARIANT (1)..(17): Xaa = Any Amino Acid
ACEWCANPXACXTXXGC

SEQ ID NO: 13162 - protein, 17 aa, Artificial Sequence
  Synthetically generated peptide
  VARIANT (1)..(17): Xaa = Any Amino Acid
ACEWCANPXACXTXGXC

SEQ ID NO: 13163 - protein, 16 aa, Artificial Sequence
  Synthetically generated peptide
  VARIANT (1)..(16): Xaa = Any Amino Acid
ACEWCANPXACXTGXC

SEQ ID NO: 13164 - protein, 17 aa, Artificial Sequence
  Synthetically generated peptide
  VARIANT (1)..(17): Xaa = Any Amino Acid
ACEWCANPXACXTGXXC

SEQ ID NO: 13165 - protein, 15 aa, Artificial Sequence
  Synthetically generated peptide
  VARIANT (1)..(15): Xaa = Any Amino Acid
ACEWCANPXACTXGC

SEQ ID NO: 13166 - protein, 16 aa, Artificial Sequence
  Synthetically generated peptide
  VARIANT (1)..(16): Xaa = Any Amino Acid
ACEWCANPXACTXXGC

SEQ ID NO: 13167 - protein, 17 aa, Artificial Sequence
  Synthetically generated peptide
  VARIANT (1)..(17): Xaa = Any Amino Acid
ACEWCANPXACTXXXGC

SEQ ID NO: 13168 - protein, 17 aa, Artificial Sequence
  Synthetically generated peptide
  VARIANT (1)..(17): Xaa = Any Amino Acid
ACEWCANPXACTXXGXC

SEQ ID NO: 13169 - protein, 16 aa, Artificial Sequence
  Synthetically generated peptide
  VARIANT (1)..(16): Xaa = Any Amino Acid
ACEWCANPXACTXGXC

SEQ ID NO: 13170 - protein, 17 aa, Artificial Sequence
  Synthetically generated peptide
  VARIANT (1)..(17): Xaa = Any Amino Acid
ACEWCANPXACTXGXXC

SEQ ID NO: 13171 - protein, 15 aa, Artificial Sequence
  Synthetically generated peptide
  VARIANT (1)..(15): Xaa = Any Amino Acid
ACEWCANPXACTGXC

SEQ ID NO: 13172 - protein, 16 aa, Artificial Sequence
  Synthetically generated peptide
  VARIANT (1)..(16): Xaa = Any Amino Acid
ACEWCANPXACTGXXC

SEQ ID NO: 13173 - protein, 17 aa, Artificial Sequence
  Synthetically generated peptide
  VARIANT (1)..(17): Xaa = Any Amino Acid
ACEWCANPXACTGXXXC

SEQ ID NO: 13174 - protein, 14 aa, Artificial Sequence
  Synthetically generated peptide
  VARIANT (1)..(14): Xaa = Any Amino Acid
ACEWCANPAXCTGC

SEQ ID NO: 13175 - protein, 15 aa, Artificial Sequence
  Synthetically generated peptide
  VARIANT (1)..(15): Xaa = Any Amino Acid
ACEWCANPAXXCTGC

SEQ ID NO: 13176 - protein, 16 aa, Artificial Sequence
  Synthetically generated peptide
  VARIANT (1)..(16): Xaa = Any Amino Acid
ACEWCANPAXXXCTGC

SEQ ID NO: 13177 - protein, 17 aa, Artificial Sequence
  Synthetically generated peptide
  VARIANT (1)..(17): Xaa = Any Amino Acid
ACEWCANPAXXXXCTGC

SEQ ID NO: 13178 - protein, 17 aa, Artificial Sequence
  Synthetically generated peptide
  VARIANT (1)..(17): Xaa = Any Amino Acid
ACEWCANPAXXXCXTGC

SEQ ID NO: 13179 - protein, 17 aa, Artificial Sequence
  Synthetically generated peptide
  VARIANT (1)..(17): Xaa = Any Amino Acid
ACEWCANPAXXXCTXGC

SEQ ID NO: 13180 - protein, 17 aa, Artificial Sequence
  Synthetically generated peptide
  VARIANT (1)..(17): Xaa = Any Amino Acid
ACEWCANPAXXXCTGXC

SEQ ID NO: 13181 - protein, 16 aa, Artificial Sequence
  Synthetically generated peptide
  VARIANT (1)..(16): Xaa = Any Amino Acid
ACEWCANPAXXCXTGC

SEQ ID NO: 13182 - protein, 17 aa, Artificial Sequence
  Synthetically generated peptide
  VARIANT (1)..(17): Xaa = Any Amino Acid
ACEWCANPAXXCXXTGC

SEQ ID NO: 13183 - protein, 17 aa, Artificial Sequence
  Synthetically generated peptide
  VARIANT (1)..(17): Xaa = Any Amino Acid
ACEWCANPAXXCXTXGC

SEQ ID NO: 13184 - protein, 17 aa, Artificial Sequence
  Synthetically generated peptide
  VARIANT (1)..(17): Xaa = Any Amino Acid
ACEWCANPAXXCXTGXC

SEQ ID NO: 13185 - protein, 16 aa, Artificial Sequence
  Synthetically generated peptide
  VARIANT (1)..(16): Xaa = Any Amino Acid
ACEWCANPAXXCTXGC

SEQ ID NO: 13186 - protein, 17 aa, Artificial Sequence
  Synthetically generated peptide
  VARIANT (1)..(17): Xaa = Any Amino Acid
ACEWCANPAXXCTXXGC

SEQ ID NO: 13187 - protein, 17 aa, Artificial Sequence
  Synthetically generated peptide
  VARIANT (1)..(17): Xaa = Any Amino Acid
ACEWCANPAXXCTXGXC

SEQ ID NO: 13188 - protein, 16 aa, Artificial Sequence
  Synthetically generated peptide
  VARIANT (1)..(16): Xaa = Any Amino Acid
ACEWCANPAXXCTGXC

SEQ ID NO: 13189 - protein, 17 aa, Artificial Sequence
  Synthetically generated peptide
  VARIANT (1)..(17): Xaa = Any Amino Acid
ACEWCANPAXXCTGXXC

SEQ ID NO: 13190 - protein, 15 aa, Artificial Sequence
  Synthetically generated peptide
  VARIANT (1)..(15): Xaa = Any Amino Acid
ACEWCANPAXCXTGC

SEQ ID NO: 13191 - protein, 16 aa, Artificial Sequence
  Synthetically generated peptide
  VARIANT (1)..(16): Xaa = Any Amino Acid
ACEWCANPAXCXXTGC

SEQ ID NO: 13192 - protein, 17 aa, Artificial Sequence
  Synthetically generated peptide
  VARIANT (1)..(17): Xaa = Any Amino Acid
ACEWCANPAXCXXXTGC

SEQ ID NO: 13193 - protein, 17 aa, Artificial Sequence
  Synthetically generated peptide
  VARIANT (1)..(17): Xaa = Any Amino Acid
ACEWCANPAXCXXTXGC

SEQ ID NO: 13194 - protein, 17 aa, Artificial Sequence
  Synthetically generated peptide
  VARIANT (1)..(17): Xaa = Any Amino Acid
ACEWCANPAXCXXTGXC

SEQ ID NO: 13195 - protein, 16 aa, Artificial Sequence
  Synthetically generated peptide
  VARIANT (1)..(16): Xaa = Any Amino Acid
ACEWCANPAXCXTXGC

SEQ ID NO: 13196 - protein, 17 aa, Artificial Sequence
  Synthetically generated peptide
  VARIANT (1)..(17): Xaa = Any Amino Acid
ACEWCANPAXCXTXXGC

SEQ ID NO: 13197 - protein, 17 aa, Artificial Sequence
  Synthetically generated peptide
  VARIANT (1)..(17): Xaa = Any Amino Acid
ACEWCANPAXCXTXGXC

SEQ ID NO: 13198 - protein, 16 aa, Artificial Sequence
  Synthetically generated peptide
  VARIANT (1)..(16): Xaa = Any Amino Acid
ACEWCANPAXCXTGXC

SEQ ID NO: 13199 - protein, 17 aa, Artificial Sequence
  Synthetically generated peptide
  VARIANT (1)..(17): Xaa = Any Amino Acid
ACEWCANPAXCXTGXXC

SEQ ID NO: 13200 - protein, 15 aa, Artificial Sequence
  Synthetically generated peptide
  VARIANT (1)..(15): Xaa = Any Amino Acid
ACEWCANPAXCTXGC

SEQ ID NO: 13201 - protein, 16 aa, Artificial Sequence
  Synthetically generated peptide
  VARIANT (1)..(16): Xaa = Any Amino Acid
ACEWCANPAXCTXXGC

SEQ ID NO: 13202 - protein, 17 aa, Artificial Sequence
  Synthetically generated peptide
  VARIANT (1)..(17): Xaa = Any Amino Acid
ACEWCANPAXCTXXXGC

SEQ ID NO: 13203 - protein, 17 aa, Artificial Sequence
  Synthetically generated peptide
  VARIANT (1)..(17): Xaa = Any Amino Acid
ACEWCANPAXCTXXGXC

SEQ ID NO: 13204 - protein, 16 aa, Artificial Sequence
  Synthetically generated peptide
  VARIANT (1)..(16): Xaa = Any Amino Acid
ACEWCANPAXCTXGXC

SEQ ID NO: 13205 - protein, 17 aa, Artificial Sequence
  Synthetically generated peptide
  VARIANT (1)..(17): Xaa = Any Amino Acid
ACEWCANPAXCTXGXXC

SEQ ID NO: 13206 - protein, 15 aa, Artificial Sequence
  Synthetically generated peptide
  VARIANT (1)..(15): Xaa = Any Amino Acid
ACEWCANPAXCTGXC

SEQ ID NO: 13207 - protein, 16 aa, Artificial Sequence
  Synthetically generated peptide
  VARIANT (1)..(16): Xaa = Any Amino Acid
ACEWCANPAXCTGXXC

SEQ ID NO: 13208 - protein, 17 aa, Artificial Sequence
  Synthetically generated peptide
  VARIANT (1)..(17): Xaa = Any Amino Acid
ACEWCANPAXCTGXXXC

SEQ ID NO: 13209 - protein, 14 aa, Artificial Sequence
  Synthetically generated peptide
  VARIANT (1)..(14): Xaa = Any Amino Acid
ACEWCANPACXTGC

SEQ ID NO: 13210 - protein, 15 aa, Artificial Sequence
  Synthetically generated peptide
  VARIANT (1)..(15): Xaa = Any Amino Acid
ACEWCANPACXXTGC

SEQ ID NO: 13211 - protein, 16 aa, Artificial Sequence
  Synthetically generated peptide
  VARIANT (1)..(16): Xaa = Any Amino Acid
ACEWCANPACXXXTGC

SEQ ID NO: 13212 - protein, 17 aa, Artificial Sequence
  Synthetically generated peptide
  VARIANT (1)..(17): Xaa = Any Amino Acid
ACEWCANPACXXXXTGC

SEQ ID NO: 13213 - protein, 17 aa, Artificial Sequence
  Synthetically generated peptide
  VARIANT (1)..(17): Xaa = Any Amino Acid
ACEWCANPACXXXTXGC

SEQ ID NO: 13214 - protein, 17 aa, Artificial Sequence
  Synthetically generated peptide
  VARIANT (1)..(17): Xaa = Any Amino Acid
ACEWCANPACXXXTGXC

SEQ ID NO: 13215 - protein, 16 aa, Artificial Sequence
  Synthetically generated peptide
  VARIANT (1)..(16): Xaa = Any Amino Acid
ACEWCANPACXXTXGC

SEQ ID NO: 13216 - protein, 17 aa, Artificial Sequence
  Synthetically generated peptide
  VARIANT (1)..(17): Xaa = Any Amino Acid
ACEWCANPACXXTXXGC

SEQ ID NO: 13217 - protein, 17 aa, Artificial Sequence
  Synthetically generated peptide
  VARIANT (1)..(17): Xaa = Any Amino Acid
ACEWCANPACXXTXGXC

SEQ ID NO: 13218 - protein, 16 aa, Artificial Sequence
  Synthetically generated peptide
  VARIANT (1)..(16): Xaa = Any Amino Acid
ACEWCANPACXXTGXC

SEQ ID NO: 13219 - protein, 17 aa, Artificial Sequence
  Synthetically generated peptide
  VARIANT (1)..(17): Xaa = Any Amino Acid
ACEWCANPACXXTGXXC

SEQ ID NO: 13220 - protein, 15 aa, Artificial Sequence
  Synthetically generated peptide
  VARIANT (1)..(15): Xaa = Any Amino Acid
ACEWCANPACXTXGC

SEQ ID NO: 13221 - protein, 16 aa, Artificial Sequence
  Synthetically generated peptide
  VARIANT (1)..(16): Xaa = Any Amino Acid
ACEWCANPACXTXXGC

SEQ ID NO: 13222 - protein, 17 aa, Artificial Sequence
  Synthetically generated peptide
  VARIANT (1)..(17): Xaa = Any Amino Acid
ACEWCANPACXTXXXGC

SEQ ID NO: 13223 - protein, 17 aa, Artificial Sequence
  Synthetically generated peptide
  VARIANT (1)..(17): Xaa = Any Amino Acid
ACEWCANPACXTXXGXC

SEQ ID NO: 13224 - protein, 16 aa, Artificial Sequence
  Synthetically generated peptide
  VARIANT (1)..(16): Xaa = Any Amino Acid
ACEWCANPACXTXGXC

SEQ ID NO: 13225 - protein, 17 aa, Artificial Sequence
  Synthetically generated peptide
  VARIANT (1)..(17): Xaa = Any Amino Acid
ACEWCANPACXTXGXXC

SEQ ID NO: 13226 - protein, 15 aa, Artificial Sequence
  Synthetically generated peptide
  VARIANT (1)..(15): Xaa = Any Amino Acid
ACEWCANPACXTGXC

SEQ ID NO: 13227 - protein, 16 aa, Artificial Sequence
  Synthetically generated peptide
  VARIANT (1)..(16): Xaa = Any Amino Acid
ACEWCANPACXTGXXC

SEQ ID NO: 13228 - protein, 17 aa, Artificial Sequence
  Synthetically generated peptide
  VARIANT (1)..(17): Xaa = Any Amino Acid
ACEWCANPACXTGXXXC

SEQ ID NO: 13229 - protein, 14 aa, Artificial Sequence
  Synthetically generated peptide
  VARIANT (1)..(14): Xaa = Any Amino Acid
ACEWCANPACTXGC

SEQ ID NO: 13230 - protein, 15 aa, Artificial Sequence
  Synthetically generated peptide
  VARIANT (1)..(15): Xaa = Any Amino Acid
ACEWCANPACTXXGC

SEQ ID NO: 13231 - protein, 16 aa, Artificial Sequence
  Synthetically generated peptide
  VARIANT (1)..(16): Xaa = Any Amino Acid
ACEWCANPACTXXXGC

SEQ ID NO: 13232 - protein, 17 aa, Artificial Sequence
  Synthetically generated peptide
  VARIANT (1)..(17): Xaa = Any Amino Acid
ACEWCANPACTXXXXGC

SEQ ID NO: 13233 - protein, 17 aa, Artificial Sequence
  Synthetically generated peptide
  VARIANT (1)..(17): Xaa = Any Amino Acid
ACEWCANPACTXXXGXC

SEQ ID NO: 13234 - protein, 16 aa, Artificial Sequence
  Synthetically generated peptide
  VARIANT (1)..(16): Xaa = Any Amino Acid
ACEWCANPACTXXGXC

SEQ ID NO: 13235 - protein, 17 aa, Artificial Sequence
  Synthetically generated peptide
  VARIANT (1)..(17): Xaa = Any Amino Acid
ACEWCANPACTXXGXXC

SEQ ID NO: 13236 - protein, 15 aa, Artificial Sequence
  Synthetically generated peptide
  VARIANT (1)..(15): Xaa = Any Amino Acid
ACEWCANPACTXGXC

SEQ ID NO: 13237 - protein, 16 aa, Artificial Sequence
  Synthetically generated peptide
  VARIANT (1)..(16): Xaa = Any Amino Acid
ACEWCANPACTXGXXC

SEQ ID NO: 13238 - protein, 17 aa, Artificial Sequence
  Synthetically generated peptide
  VARIANT (1)..(17): Xaa = Any Amino Acid
ACEWCANPACTXGXXXC

SEQ ID NO: 13239 - protein, 14 aa, Artificial Sequence
  Synthetically generated peptide
  VARIANT (1)..(14): Xaa = Any Amino Acid
ACEWCANPACTGXC

SEQ ID NO: 13240 - protein, 15 aa, Artificial Sequence
  Synthetically generated peptide
  VARIANT (1)..(15): Xaa = Any Amino Acid
ACEWCANPACTGXXC

SEQ ID NO: 13241 - protein, 16 aa, Artificial Sequence
  Synthetically generated peptide
  VARIANT (1)..(16): Xaa = Any Amino Acid
ACEWCANPACTGXXXC

SEQ ID NO: 13242 - protein, 17 aa, Artificial Sequence
  Synthetically generated peptide
  VARIANT (1)..(17): Xaa = Any Amino Acid
ACEWCANPACTGXXXXC

SEQ ID NO: 13243 - protein, 14 aa, Artificial Sequence
  Synthetically generated peptide
  VARIANT (1)..(14): Xaa = Any Amino Acid
CCXEWACNPACTGA

SEQ ID NO: 13244 - protein, 15 aa, Artificial Sequence
  Synthetically generated peptide
  VARIANT (1)..(15): Xaa = Any Amino Acid
CCXXEWACNPACTGA

SEQ ID NO: 13245 - protein, 16 aa, Artificial Sequence
  Synthetically generated peptide
  VARIANT (1)..(16): Xaa = Any Amino Acid
CCXXXEWACNPACTGA

SEQ ID NO: 13246 - protein, 17 aa, Artificial Sequence
  Synthetically generated peptide
  VARIANT (1)..(17): Xaa = Any Amino Acid
CCXXXXEWACNPACTGA

SEQ ID NO: 13247 - protein, 17 aa, Artificial Sequence
  Synthetically generated peptide
  VARIANT (1)..(17): Xaa = Any Amino Acid
CCXXXEXWACNPACTGA

SEQ ID NO: 13248 - protein, 17 aa, Artificial Sequence
  Synthetically generated peptide
  VARIANT (1)..(17): Xaa = Any Amino Acid
CCXXXEWXACNPACTGA

SEQ ID NO: 13249 - protein, 17 aa, Artificial Sequence
  Synthetically generated peptide
  VARIANT (1)..(17): Xaa = Any Amino Acid
CCXXXEWACXNPACTGA

SEQ ID NO: 13250 - protein, 17 aa, Artificial Sequence
  Synthetically generated peptide
  VARIANT (1)..(17): Xaa = Any Amino Acid
CCXXXEWACNXPACTGA

SEQ ID NO: 13251 - protein, 17 aa, Artificial Sequence
  Synthetically generated peptide
  VARIANT (1)..(17): Xaa = Any Amino Acid
CCXXXEWACNPXACTGA

SEQ ID NO: 13252 - protein, 17 aa, Artificial Sequence
  Synthetically generated peptide
  VARIANT (1)..(17): Xaa = Any Amino Acid
CCXXXEWACNPAXCTGA

SEQ ID NO: 13253 - protein, 17 aa, Artificial Sequence
  Synthetically generated peptide
  VARIANT (1)..(17): Xaa = Any Amino Acid
CCXXXEWACNPACXTGA

SEQ ID NO: 13254 - protein, 17 aa, Artificial Sequence
  Synthetically generated peptide
  VARIANT (1)..(17): Xaa = Any Amino Acid
CCXXXEWACNPACTXGA

SEQ ID NO: 13255 - protein, 17 aa, Artificial Sequence
  Synthetically generated peptide
  VARIANT (1)..(17): Xaa = Any Amino Acid
CCXXXEWACNPACTGXA

SEQ ID NO: 13256 - protein, 16 aa, Artificial Sequence
  Synthetically generated peptide
  VARIANT (1)..(16): Xaa = Any Amino Acid
CCXXEXWACNPACTGA

SEQ ID NO: 13257 - protein, 17 aa, Artificial Sequence
  Synthetically generated peptide
  VARIANT (1)..(17): Xaa = Any Amino Acid
CCXXEXXWACNPACTGA

SEQ ID NO: 13258 - protein, 17 aa, Artificial Sequence
  Synthetically generated peptide
  VARIANT (1)..(17): Xaa = Any Amino Acid
CCXXEXWXACNPACTGA

SEQ ID NO: 13259 - protein, 17 aa, Artificial Sequence
  Synthetically generated peptide
  VARIANT (1)..(17): Xaa = Any Amino Acid
CCXXEXWACXNPACTGA

SEQ ID NO: 13260 - protein, 17 aa, Artificial Sequence
  Synthetically generated peptide
  VARIANT (1)..(17): Xaa = Any Amino Acid
CCXXEXWACNXPACTGA

SEQ ID NO: 13261 - protein, 17 aa, Artificial Sequence
  Synthetically generated peptide
  VARIANT (1)..(17): Xaa = Any Amino Acid
CCXXEXWACNPXACTGA

SEQ ID NO: 13262 - protein, 17 aa, Artificial Sequence
  Synthetically generated peptide
  VARIANT (1)..(17): Xaa = Any Amino Acid
CCXXEXWACNPAXCTGA

SEQ ID NO: 13263 - protein, 17 aa, Artificial Sequence
  Synthetically generated peptide
  VARIANT (1)..(17): Xaa = Any Amino Acid
CCXXEXWACNPACXTGA

SEQ ID NO: 13264 - protein, 17 aa, Artificial Sequence
  Synthetically generated peptide
  VARIANT (1)..(17): Xaa = Any Amino Acid
CCXXEXWACNPACTXGA

SEQ ID NO: 13265 - protein, 17 aa, Artificial Sequence
  Synthetically generated peptide
  VARIANT (1)..(17): Xaa = Any Amino Acid
CCXXEXWACNPACTGXA

SEQ ID NO: 13266 - protein, 16 aa, Artificial Sequence
  Synthetically generated peptide
  VARIANT (1)..(16): Xaa = Any Amino Acid
CCXXEWXACNPACTGA

SEQ ID NO: 13267 - protein, 17 aa, Artificial Sequence
  Synthetically generated peptide
  VARIANT (1)..(17): Xaa = Any Amino Acid
CCXXEWXXACNPACTGA

SEQ ID NO: 13268 - protein, 17 aa, Artificial Sequence
  Synthetically generated peptide
  VARIANT (1)..(17): Xaa = Any Amino Acid
CCXXEWXACXNPACTGA

SEQ ID NO: 13269 - protein, 17 aa, Artificial Sequence
  Synthetically generated peptide
  VARIANT (1)..(17): Xaa = Any Amino Acid
CCXXEWXACNXPACTGA

SEQ ID NO: 13270 - protein, 17 aa, Artificial Sequence
  Synthetically generated peptide
  VARIANT (1)..(17): Xaa = Any Amino Acid
CCXXEWXACNPXACTGA

SEQ ID NO: 13271 - protein, 17 aa, Artificial Sequence
  Synthetically generated peptide
  VARIANT (1)..(17): Xaa = Any Amino Acid
CCXXEWXACNPAXCTGA

SEQ ID NO: 13272 - protein, 17 aa, Artificial Sequence
  Synthetically generated peptide
  VARIANT (1)..(17): Xaa = Any Amino Acid
CCXXEWXACNPACXTGA

SEQ ID NO: 13273 - protein, 17 aa, Artificial Sequence
  Synthetically generated peptide
  VARIANT (1)..(17): Xaa = Any Amino Acid
CCXXEWXACNPACTXGA

SEQ ID NO: 13274 - protein, 17 aa, Artificial Sequence
  Synthetically generated peptide
  VARIANT (1)..(17): Xaa = Any Amino Acid
CCXXEWXACNPACTGXA

SEQ ID NO: 13275 - protein, 16 aa, Artificial Sequence
  Synthetically generated peptide
  VARIANT (1)..(16): Xaa = Any Amino Acid
CCXXEWACXNPACTGA

SEQ ID NO: 13276 - protein, 17 aa, Artificial Sequence
  Synthetically generated peptide
  VARIANT (1)..(17): Xaa = Any Amino Acid
CCXXEWACXXNPACTGA

SEQ ID NO: 13277 - protein, 17 aa, Artificial Sequence
  Synthetically generated peptide
  VARIANT (1)..(17): Xaa = Any Amino Acid
CCXXEWACXNXPACTGA

SEQ ID NO: 13278 - protein, 17 aa, Artificial Sequence
  Synthetically generated peptide
  VARIANT (1)..(17): Xaa = Any Amino Acid
CCXXEWACXNPXACTGA

SEQ ID NO: 13279 - protein, 17 aa, Artificial Sequence
  Synthetically generated peptide
  VARIANT (1)..(17): Xaa = Any Amino Acid
CCXXEWACXNPAXCTGA

SEQ ID NO: 13280 - protein, 17 aa, Artificial Sequence
  Synthetically generated peptide
  VARIANT (1)..(17): Xaa = Any Amino Acid
CCXXEWACXNPACXTGA

SEQ ID NO: 13281 - protein, 17 aa, Artificial Sequence
  Synthetically generated peptide
  VARIANT (1)..(17): Xaa = Any Amino Acid
CCXXEWACXNPACTXGA

SEQ ID NO: 13282 - protein, 17 aa, Artificial Sequence
  Synthetically generated peptide
  VARIANT (1)..(17): Xaa = Any Amino Acid
CCXXEWACXNPACTGXA

SEQ ID NO: 13283 - protein, 16 aa, Artificial Sequence
  Synthetically generated peptide
  VARIANT (1)..(16): Xaa = Any Amino Acid
CCXXEWACNXPACTGA

SEQ ID NO: 13284 - protein, 17 aa, Artificial Sequence
  Synthetically generated peptide
  VARIANT (1)..(17): Xaa = Any Amino Acid
CCXXEWACNXXPACTGA

SEQ ID NO: 13285 - protein, 17 aa, Artificial Sequence
  Synthetically generated peptide
  VARIANT (1)..(17): Xaa = Any Amino Acid
CCXXEWACNXPXACTGA

SEQ ID NO: 13286 - protein, 17 aa, Artificial Sequence
  Synthetically generated peptide
  VARIANT (1)..(17): Xaa = Any Amino Acid
CCXXEWACNXPAXCTGA

SEQ ID NO: 13287 - protein, 17 aa, Artificial Sequence
  Synthetically generated peptide
  VARIANT (1)..(17): Xaa = Any Amino Acid
CCXXEWACNXPACXTGA

SEQ ID NO: 13288 - protein, 17 aa, Artificial Sequence
  Synthetically generated peptide
  VARIANT (1)..(17): Xaa = Any Amino Acid
CCXXEWACNXPACTXGA

SEQ ID NO: 13289 - protein, 17 aa, Artificial Sequence
  Synthetically generated peptide
  VARIANT (1)..(17): Xaa = Any Amino Acid
CCXXEWACNXPACTGXA

SEQ ID NO: 13290 - protein, 16 aa, Artificial Sequence
  Synthetically generated peptide
  VARIANT (1)..(16): Xaa = Any Amino Acid
CCXXEWACNPXACTGA

SEQ ID NO: 13291 - protein, 17 aa, Artificial Sequence
  Synthetically generated peptide
  VARIANT (1)..(17): Xaa = Any Amino Acid
CCXXEWACNPXXACTGA

SEQ ID NO: 13292 - protein, 17 aa, Artificial Sequence
  Synthetically generated peptide
  VARIANT (1)..(17): Xaa = Any Amino Acid
CCXXEWACNPXAXCTGA

SEQ ID NO: 13293 - protein, 17 aa, Artificial Sequence
  Synthetically generated peptide
  VARIANT (1)..(17): Xaa = Any Amino Acid
CCXXEWACNPXACXTGA

SEQ ID NO: 13294 - protein, 17 aa, Artificial Sequence
  Synthetically generated peptide
  VARIANT (1)..(17): Xaa = Any Amino Acid
CCXXEWACNPXACTXGA

SEQ ID NO: 13295 - protein, 17 aa, Artificial Sequence
  Synthetically generated peptide
  VARIANT (1)..(17): Xaa = Any Amino Acid
CCXXEWACNPXACTGXA

SEQ ID NO: 13296 - protein, 16 aa, Artificial Sequence
  Synthetically generated peptide
  VARIANT (1)..(16): Xaa = Any Amino Acid
CCXXEWACNPAXCTGA

SEQ ID NO: 13297 - protein, 17 aa, Artificial Sequence
  Synthetically generated peptide
  VARIANT (1)..(17): Xaa = Any Amino Acid
CCXXEWACNPAXXCTGA

SEQ ID NO: 13298 - protein, 17 aa, Artificial Sequence
  Synthetically generated peptide
  VARIANT (1)..(17): Xaa = Any Amino Acid
CCXXEWACNPAXCXTGA

SEQ ID NO: 13299 - protein, 17 aa, Artificial Sequence
  Synthetically generated peptide
  VARIANT (1)..(17): Xaa = Any Amino Acid
CCXXEWACNPAXCTXGA

SEQ ID NO: 13300 - protein, 17 aa, Artificial Sequence
  Synthetically generated peptide
  VARIANT (1)..(17): Xaa = Any Amino Acid
CCXXEWACNPAXCTGXA

SEQ ID NO: 13301 - protein, 16 aa, Artificial Sequence
  Synthetically generated peptide
  VARIANT (1)..(16): Xaa = Any Amino Acid
CCXXEWACNPACXTGA

SEQ ID NO: 13302 - protein, 17 aa, Artificial Sequence
  Synthetically generated peptide
  VARIANT (1)..(17): Xaa = Any Amino Acid
CCXXEWACNPACXXTGA

SEQ ID NO: 13303 - protein, 17 aa, Artificial Sequence
  Synthetically generated peptide
  VARIANT (1)..(17): Xaa = Any Amino Acid
CCXXEWACNPACXTXGA

SEQ ID NO: 13304 - protein, 17 aa, Artificial Sequence
  Synthetically generated peptide
  VARIANT (1)..(17): Xaa = Any Amino Acid
CCXXEWACNPACXTGXA

SEQ ID NO: 13305 - protein, 16 aa, Artificial Sequence
  Synthetically generated peptide
  VARIANT (1)..(16): Xaa = Any Amino Acid
CCXXEWACNPACTXGA

SEQ ID NO: 13306 - protein, 17 aa, Artificial Sequence
  Synthetically generated peptide
  VARIANT (1)..(17): Xaa = Any Amino Acid
CCXXEWACNPACTXXGA

SEQ ID NO: 13307 - protein, 17 aa, Artificial Sequence
  Synthetically generated peptide
  VARIANT (1)..(17): Xaa = Any Amino Acid
CCXXEWACNPACTXGXA

SEQ ID NO: 13308 - protein, 16 aa, Artificial Sequence
  Synthetically generated peptide
  VARIANT (1)..(16): Xaa = Any Amino Acid
CCXXEWACNPACTGXA

SEQ ID NO: 13309 - protein, 17 aa, Artificial Sequence
  Synthetically generated peptide
  VARIANT (1)..(17): Xaa = Any Amino Acid
CCXXEWACNPACTGXXA

SEQ ID NO: 13310 - protein, 15 aa, Artificial Sequence
  Synthetically generated peptide
  VARIANT (1)..(15): Xaa = Any Amino Acid
CCXEXWACNPACTGA

SEQ ID NO: 13311 - protein, 16 aa, Artificial Sequence
  Synthetically generated peptide
  VARIANT (1)..(16): Xaa = Any Amino Acid
CCXEXXWACNPACTGA

SEQ ID NO: 13312 - protein, 17 aa, Artificial Sequence
  Synthetically generated peptide
  VARIANT (1)..(17): Xaa = Any Amino Acid
CCXEXXXWACNPACTGA

SEQ ID NO: 13313 - protein, 17 aa, Artificial Sequence
  Synthetically generated peptide
  VARIANT (1)..(17): Xaa = Any Amino Acid
CCXEXXWXACNPACTGA

SEQ ID NO: 13314 - protein, 17 aa, Artificial Sequence
  Synthetically generated peptide
  VARIANT (1)..(17): Xaa = Any Amino Acid
CCXEXXWACXNPACTGA

SEQ ID NO: 13315 - protein, 17 aa, Artificial Sequence
  Synthetically generated peptide
  VARIANT (1)..(17): Xaa = Any Amino Acid
CCXEXXWACNXPACTGA

SEQ ID NO: 13316 - protein, 17 aa, Artificial Sequence
  Synthetically generated peptide
  VARIANT (1)..(17): Xaa = Any Amino Acid
CCXEXXWACNPXACTGA

SEQ ID NO: 13317 - protein, 17 aa, Artificial Sequence
  Synthetically generated peptide
  VARIANT (1)..(17): Xaa = Any Amino Acid
CCXEXXWACNPAXCTGA

SEQ ID NO: 13318 - protein, 17 aa, Artificial Sequence
  Synthetically generated peptide
  VARIANT (1)..(17): Xaa = Any Amino Acid
CCXEXXWACNPACXTGA

SEQ ID NO: 13319 - protein, 17 aa, Artificial Sequence
  Synthetically generated peptide
  VARIANT (1)..(17): Xaa = Any Amino Acid
CCXEXXWACNPACTXGA

SEQ ID NO: 13320 - protein, 17 aa, Artificial Sequence
  Synthetically generated peptide
  VARIANT (1)..(17): Xaa = Any Amino Acid
CCXEXXWACNPACTGXA

SEQ ID NO: 13321 - protein, 16 aa, Artificial Sequence
  Synthetically generated peptide
  VARIANT (1)..(16): Xaa = Any Amino Acid
CCXEXWXACNPACTGA

SEQ ID NO: 13322 - protein, 17 aa, Artificial Sequence
  Synthetically generated peptide
  VARIANT (1)..(17): Xaa = Any Amino Acid
CCXEXWXXACNPACTGA

SEQ ID NO: 13323 - protein, 17 aa, Artificial Sequence
  Synthetically generated peptide
  VARIANT (1)..(17): Xaa = Any Amino Acid
CCXEXWXACXNPACTGA

SEQ ID NO: 13324 - protein, 17 aa, Artificial Sequence
  Synthetically generated peptide
  VARIANT (1)..(17): Xaa = Any Amino Acid
CCXEXWXACNXPACTGA

SEQ ID NO: 13325 - protein, 17 aa, Artificial Sequence
  Synthetically generated peptide
  VARIANT (1)..(17): Xaa = Any Amino Acid
CCXEXWXACNPXACTGA

SEQ ID NO: 13326 - protein, 17 aa, Artificial Sequence
  Synthetically generated peptide
  VARIANT (1)..(17): Xaa = Any Amino Acid
CCXEXWXACNPAXCTGA

SEQ ID NO: 13327 - protein, 17 aa, Artificial Sequence
  Synthetically generated peptide
  VARIANT (1)..(17): Xaa = Any Amino Acid
CCXEXWXACNPACXTGA

SEQ ID NO: 13328 - protein, 17 aa, Artificial Sequence
  Synthetically generated peptide
  VARIANT (1)..(17): Xaa = Any Amino Acid
CCXEXWXACNPACTXGA

SEQ ID NO: 13329 - protein, 17 aa, Artificial Sequence
  Synthetically generated peptide
  VARIANT (1)..(17): Xaa = Any Amino Acid
CCXEXWXACNPACTGXA

SEQ ID NO: 13330 - protein, 16 aa, Artificial Sequence
  Synthetically generated peptide
  VARIANT (1)..(16): Xaa = Any Amino Acid
CCXEXWACXNPACTGA

SEQ ID NO: 13331 - protein, 17 aa, Artificial Sequence
  Synthetically generated peptide
  VARIANT (1)..(17): Xaa = Any Amino Acid
CCXEXWACXXNPACTGA

SEQ ID NO: 13332 - protein, 17 aa, Artificial Sequence
  Synthetically generated peptide
  VARIANT (1)..(17): Xaa = Any Amino Acid
CCXEXWACXNXPACTGA

SEQ ID NO: 13333 - protein, 17 aa, Artificial Sequence
  Synthetically generated peptide
  VARIANT (1)..(17): Xaa = Any Amino Acid
CCXEXWACXNPXACTGA

SEQ ID NO: 13334 - protein, 17 aa, Artificial Sequence
  Synthetically generated peptide
  VARIANT (1)..(17): Xaa = Any Amino Acid
CCXEXWACXNPAXCTGA

SEQ ID NO: 13335 - protein, 17 aa, Artificial Sequence
  Synthetically generated peptide
  VARIANT (1)..(17): Xaa = Any Amino Acid
CCXEXWACXNPACXTGA

SEQ ID NO: 13336 - protein, 17 aa, Artificial Sequence
  Synthetically generated peptide
  VARIANT (1)..(17): Xaa = Any Amino Acid
CCXEXWACXNPACTXGA

SEQ ID NO: 13337 - protein, 17 aa, Artificial Sequence
  Synthetically generated peptide
  VARIANT (1)..(17): Xaa = Any Amino Acid
CCXEXWACXNPACTGXA

SEQ ID NO: 13338 - protein, 16 aa, Artificial Sequence
  Synthetically generated peptide
  VARIANT (1)..(16): Xaa = Any Amino Acid
CCXEXWACNXPACTGA

SEQ ID NO: 13339 - protein, 17 aa, Artificial Sequence
  Synthetically generated peptide
  VARIANT (1)..(17): Xaa = Any Amino Acid
CCXEXWACNXXPACTGA

SEQ ID NO: 13340 - protein, 17 aa, Artificial Sequence
  Synthetically generated peptide
  VARIANT (1)..(17): Xaa = Any Amino Acid
CCXEXWACNXPXACTGA

SEQ ID NO: 13341 - protein, 17 aa, Artificial Sequence
  Synthetically generated peptide
  VARIANT (1)..(17): Xaa = Any Amino Acid
CCXEXWACNXPAXCTGA

SEQ ID NO: 13342 - protein, 17 aa, Artificial Sequence
  Synthetically generated peptide
  VARIANT (1)..(17): Xaa = Any Amino Acid
CCXEXWACNXPACXTGA

SEQ ID NO: 13343 - protein, 17 aa, Artificial Sequence
  Synthetically generated peptide
  VARIANT (1)..(17): Xaa = Any Amino Acid
CCXEXWACNXPACTXGA

SEQ ID NO: 13344 - protein, 17 aa, Artificial Sequence
  Synthetically generated peptide
  VARIANT (1)..(17): Xaa = Any Amino Acid
CCXEXWACNXPACTGXA

SEQ ID NO: 13345 - protein, 16 aa, Artificial Sequence
  Synthetically generated peptide
  VARIANT (1)..(16): Xaa = Any Amino Acid
CCXEXWACNPXACTGA

SEQ ID NO: 13346 - protein, 17 aa, Artificial Sequence
  Synthetically generated peptide
  VARIANT (1)..(17): Xaa = Any Amino Acid
CCXEXWACNPXXACTGA

SEQ ID NO: 13347 - protein, 17 aa, Artificial Sequence
  Synthetically generated peptide
  VARIANT (1)..(17): Xaa = Any Amino Acid
CCXEXWACNPXAXCTGA

SEQ ID NO: 13348 - protein, 17 aa, Artificial Sequence
  Synthetically generated peptide
  VARIANT (1)..(17): Xaa = Any Amino Acid
CCXEXWACNPXACXTGA

SEQ ID NO: 13349 - protein, 17 aa, Artificial Sequence
  Synthetically generated peptide
  VARIANT (1)..(17): Xaa = Any Amino Acid
CCXEXWACNPXACTXGA

SEQ ID NO: 13350 - protein, 17 aa, Artificial Sequence
  Synthetically generated peptide
  VARIANT (1)..(17): Xaa = Any Amino Acid
CCXEXWACNPXACTGXA

SEQ ID NO: 13351 - protein, 16 aa, Artificial Sequence
  Synthetically generated peptide
  VARIANT (1)..(16): Xaa = Any Amino Acid
CCXEXWACNPAXCTGA

SEQ ID NO: 13352 - protein, 17 aa, Artificial Sequence
  Synthetically generated peptide
  VARIANT (1)..(17): Xaa = Any Amino Acid
CCXEXWACNPAXXCTGA

SEQ ID NO: 13353 - protein, 17 aa, Artificial Sequence
  Synthetically generated peptide
  VARIANT (1)..(17): Xaa = Any Amino Acid
CCXEXWACNPAXCXTGA

SEQ ID NO: 13354 - protein, 17 aa, Artificial Sequence
  Synthetically generated peptide
  VARIANT (1)..(17): Xaa = Any Amino Acid
CCXEXWACNPAXCTXGA

SEQ ID NO: 13355 - protein, 17 aa, Artificial Sequence
  Synthetically generated peptide
  VARIANT (1)..(17): Xaa = Any Amino Acid
CCXEXWACNPAXCTGXA

SEQ ID NO: 13356 - protein, 16 aa, Artificial Sequence
  Synthetically generated peptide
  VARIANT (1)..(16): Xaa = Any Amino Acid
CCXEXWACNPACXTGA

SEQ ID NO: 13357 - protein, 17 aa, Artificial Sequence
  Synthetically generated peptide
  VARIANT (1)..(17): Xaa = Any Amino Acid
CCXEXWACNPACXXTGA

SEQ ID NO: 13358 - protein, 17 aa, Artificial Sequence
  Synthetically generated peptide
  VARIANT (1)..(17): Xaa = Any Amino Acid
CCXEXWACNPACXTXGA

SEQ ID NO: 13359 - protein, 17 aa, Artificial Sequence
  Synthetically generated peptide
  VARIANT (1)..(17): Xaa = Any Amino Acid
CCXEXWACNPACXTGXA

SEQ ID NO: 13360 - protein, 16 aa, Artificial Sequence
  Synthetically generated peptide
  VARIANT (1)..(16): Xaa = Any Amino Acid
CCXEXWACNPACTXGA

SEQ ID NO: 13361 - protein, 17 aa, Artificial Sequence
  Synthetically generated peptide
  VARIANT (1)..(17): Xaa = Any Amino Acid
CCXEXWACNPACTXXGA

SEQ ID NO: 13362 - protein, 17 aa, Artificial Sequence
  Synthetically generated peptide
  VARIANT (1)..(17): Xaa = Any Amino Acid
CCXEXWACNPACTXGXA

SEQ ID NO: 13363 - protein, 16 aa, Artificial Sequence
  Synthetically generated peptide
  VARIANT (1)..(16): Xaa = Any Amino Acid
CCXEXWACNPACTGXA

SEQ ID NO: 13364 - protein, 17 aa, Artificial Sequence
  Synthetically generated peptide
  VARIANT (1)..(17): Xaa = Any Amino Acid
CCXEXWACNPACTGXXA

SEQ ID NO: 13365 - protein, 15 aa, Artificial Sequence
  Synthetically generated peptide
  VARIANT (1)..(15): Xaa = Any Amino Acid
CCXEWXACNPACTGA

SEQ ID NO: 13366 - protein, 16 aa, Artificial Sequence
  Synthetically generated peptide
  VARIANT (1)..(16): Xaa = Any Amino Acid
CCXEWXXACNPACTGA

SEQ ID NO: 13367 - protein, 17 aa, Artificial Sequence
  Synthetically generated peptide
  VARIANT (1)..(17): Xaa = Any Amino Acid
CCXEWXXXACNPACTGA

SEQ ID NO: 13368 - protein, 17 aa, Artificial Sequence
  Synthetically generated peptide
  VARIANT (1)..(17): Xaa = Any Amino Acid
CCXEWXXACXNPACTGA

SEQ ID NO: 13369 - protein, 17 aa, Artificial Sequence
  Synthetically generated peptide
  VARIANT (1)..(17): Xaa = Any Amino Acid
CCXEWXXACNXPACTGA

SEQ ID NO: 13370 - protein, 17 aa, Artificial Sequence
  Synthetically generated peptide
  VARIANT (1)..(17): Xaa = Any Amino Acid
CCXEWXXACNPXACTGA

SEQ ID NO: 13371 - protein, 17 aa, Artificial Sequence
  Synthetically generated peptide
  VARIANT (1)..(17): Xaa = Any Amino Acid
CCXEWXXACNPAXCTGA

SEQ ID NO: 13372 - protein, 17 aa, Artificial Sequence
  Synthetically generated peptide
  VARIANT (1)..(17): Xaa = Any Amino Acid
CCXEWXXACNPACXTGA

SEQ ID NO: 13373 - protein, 17 aa, Artificial Sequence
  Synthetically generated peptide
  VARIANT (1)..(17): Xaa = Any Amino Acid
CCXEWXXACNPACTXGA

SEQ ID NO: 13374 - protein, 17 aa, Artificial Sequence
  Synthetically generated peptide
  VARIANT (1)..(17): Xaa = Any Amino Acid
CCXEWXXACNPACTGXA

SEQ ID NO: 13375 - protein, 16 aa, Artificial Sequence
  Synthetically generated peptide
  VARIANT (1)..(16): Xaa = Any Amino Acid
CCXEWXACXNPACTGA

SEQ ID NO: 13376 - protein, 17 aa, Artificial Sequence
  Synthetically generated peptide
  VARIANT (1)..(17): Xaa = Any Amino Acid
CCXEWXACXXNPACTGA

SEQ ID NO: 13377 - protein, 17 aa, Artificial Sequence
  Synthetically generated peptide
  VARIANT (1)..(17): Xaa = Any Amino Acid
CCXEWXACXNXPACTGA

SEQ ID NO: 13378 - protein, 17 aa, Artificial Sequence
  Synthetically generated peptide
  VARIANT (1)..(17): Xaa = Any Amino Acid
CCXEWXACXNPXACTGA

SEQ ID NO: 13379 - protein, 17 aa, Artificial Sequence
  Synthetically generated peptide
  VARIANT (1)..(17): Xaa = Any Amino Acid
CCXEWXACXNPAXCTGA

SEQ ID NO: 13380 - protein, 17 aa, Artificial Sequence
  Synthetically generated peptide
  VARIANT (1)..(17): Xaa = Any Amino Acid
CCXEWXACXNPACXTGA

SEQ ID NO: 13381 - protein, 17 aa, Artificial Sequence
  Synthetically generated peptide
  VARIANT (1)..(17): Xaa = Any Amino Acid
CCXEWXACXNPACTXGA

SEQ ID NO: 13382 - protein, 17 aa, Artificial Sequence
  Synthetically generated peptide
  VARIANT (1)..(17): Xaa = Any Amino Acid
CCXEWXACXNPACTGXA

SEQ ID NO: 13383 - protein, 16 aa, Artificial Sequence
  Synthetically generated peptide
  VARIANT (1)..(16): Xaa = Any Amino Acid
CCXEWXACNXPACTGA

SEQ ID NO: 13384 - protein, 17 aa, Artificial Sequence
  Synthetically generated peptide
  VARIANT (1)..(17): Xaa = Any Amino Acid
CCXEWXACNXXPACTGA

SEQ ID NO: 13385 - protein, 17 aa, Artificial Sequence
  Synthetically generated peptide
  VARIANT (1)..(17): Xaa = Any Amino Acid
CCXEWXACNXPXACTGA

SEQ ID NO: 13386 - protein, 17 aa, Artificial Sequence
  Synthetically generated peptide
  VARIANT (1)..(17): Xaa = Any Amino Acid
CCXEWXACNXPAXCTGA

SEQ ID NO: 13387 - protein, 17 aa, Artificial Sequence
  Synthetically generated peptide
  VARIANT (1)..(17): Xaa = Any Amino Acid
CCXEWXACNXPACXTGA

SEQ ID NO: 13388 - protein, 17 aa, Artificial Sequence
  Synthetically generated peptide
  VARIANT (1)..(17): Xaa = Any Amino Acid
CCXEWXACNXPACTXGA

SEQ ID NO: 13389 - protein, 17 aa, Artificial Sequence
  Synthetically generated peptide
  VARIANT (1)..(17): Xaa = Any Amino Acid
CCXEWXACNXPACTGXA

SEQ ID NO: 13390 - protein, 16 aa, Artificial Sequence
  Synthetically generated peptide
  VARIANT (1)..(16): Xaa = Any Amino Acid
CCXEWXACNPXACTGA

SEQ ID NO: 13391 - protein, 17 aa, Artificial Sequence
  Synthetically generated peptide
  VARIANT (1)..(17): Xaa = Any Amino Acid
CCXEWXACNPXXACTGA

SEQ ID NO: 13392 - protein, 17 aa, Artificial Sequence
  Synthetically generated peptide
  VARIANT (1)..(17): Xaa = Any Amino Acid
CCXEWXACNPXAXCTGA

SEQ ID NO: 13393 - protein, 17 aa, Artificial Sequence
  Synthetically generated peptide
  VARIANT (1)..(17): Xaa = Any Amino Acid
CCXEWXACNPXACXTGA

SEQ ID NO: 13394 - protein, 17 aa, Artificial Sequence
  Synthetically generated peptide
  VARIANT (1)..(17): Xaa = Any Amino Acid
CCXEWXACNPXACTXGA

SEQ ID NO: 13395 - protein, 17 aa, Artificial Sequence
  Synthetically generated peptide
  VARIANT (1)..(17): Xaa = Any Amino Acid
CCXEWXACNPXACTGXA

SEQ ID NO: 13396 - protein, 16 aa, Artificial Sequence
  Synthetically generated peptide
  VARIANT (1)..(16): Xaa = Any Amino Acid
CCXEWXACNPAXCTGA

SEQ ID NO: 13397 - protein, 17 aa, Artificial Sequence
  Synthetically generated peptide
  VARIANT (1)..(17): Xaa = Any Amino Acid
CCXEWXACNPAXXCTGA

SEQ ID NO: 13398 - protein, 17 aa, Artificial Sequence
  Synthetically generated peptide
  VARIANT (1)..(17): Xaa = Any Amino Acid
CCXEWXACNPAXCXTGA

SEQ ID NO: 13399 - protein, 17 aa, Artificial Sequence
  Synthetically generated peptide
  VARIANT (1)..(17): Xaa = Any Amino Acid
CCXEWXACNPAXCTXGA

SEQ ID NO: 13400 - protein, 17 aa, Artificial Sequence
  Synthetically generated peptide
  VARIANT (1)..(17): Xaa = Any Amino Acid
CCXEWXACNPAXCTGXA

SEQ ID NO: 13401 - protein, 16 aa, Artificial Sequence
  Synthetically generated peptide
  VARIANT (1)..(16): Xaa = Any Amino Acid
CCXEWXACNPACXTGA

SEQ ID NO: 13402 - protein, 17 aa, Artificial Sequence
  Synthetically generated peptide
  VARIANT (1)..(17): Xaa = Any Amino Acid
CCXEWXACNPACXXTGA

SEQ ID NO: 13403 - protein, 17 aa, Artificial Sequence
  Synthetically generated peptide
  VARIANT (1)..(17): Xaa = Any Amino Acid
CCXEWXACNPACXTXGA

SEQ ID NO: 13404 - protein, 17 aa, Artificial Sequence
  Synthetically generated peptide
  VARIANT (1)..(17): Xaa = Any Amino Acid
CCXEWXACNPACXTGXA

SEQ ID NO: 13405 - protein, 16 aa, Artificial Sequence
  Synthetically generated peptide
  VARIANT (1)..(16): Xaa = Any Amino Acid
CCXEWXACNPACTXGA

SEQ ID NO: 13406 - protein, 17 aa, Artificial Sequence
  Synthetically generated peptide
  VARIANT (1)..(17): Xaa = Any Amino Acid
CCXEWXACNPACTXXGA

SEQ ID NO: 13407 - protein, 17 aa, Artificial Sequence
  Synthetically generated peptide
  VARIANT (1)..(17): Xaa = Any Amino Acid
CCXEWXACNPACTXGXA

SEQ ID NO: 13408 - protein, 16 aa, Artificial Sequence
  Synthetically generated peptide
  VARIANT (1)..(16): Xaa = Any Amino Acid
CCXEWXACNPACTGXA

SEQ ID NO: 13409 - protein, 17 aa, Artificial Sequence
  Synthetically generated peptide
  VARIANT (1)..(17): Xaa = Any Amino Acid
CCXEWXACNPACTGXXA

SEQ ID NO: 13410 - protein, 15 aa, Artificial Sequence
  Synthetically generated peptide
  VARIANT (1)..(15): Xaa = Any Amino Acid
CCXEWACXNPACTGA

SEQ ID NO: 13411 - protein, 16 aa, Artificial Sequence
  Synthetically generated peptide
  VARIANT (1)..(16): Xaa = Any Amino Acid
CCXEWACXXNPACTGA

SEQ ID NO: 13412 - protein, 17 aa, Artificial Sequence
  Synthetically generated peptide
  VARIANT (1)..(17): Xaa = Any Amino Acid
CCXEWACXXXNPACTGA

SEQ ID NO: 13413 - protein, 17 aa, Artificial Sequence
  Synthetically generated peptide
  VARIANT (1)..(17): Xaa = Any Amino Acid
CCXEWACXXNXPACTGA

SEQ ID NO: 13414 - protein, 17 aa, Artificial Sequence
  Synthetically generated peptide
  VARIANT (1)..(17): Xaa = Any Amino Acid
CCXEWACXXNPXACTGA

SEQ ID NO: 13415 - protein, 17 aa, Artificial Sequence
  Synthetically generated peptide
  VARIANT (1)..(17): Xaa = Any Amino Acid
CCXEWACXXNPAXCTGA

SEQ ID NO: 13416 - protein, 17 aa, Artificial Sequence
  Synthetically generated peptide
  VARIANT (1)..(17): Xaa = Any Amino Acid
CCXEWACXXNPACXTGA

SEQ ID NO: 13417 - protein, 17 aa, Artificial Sequence
  Synthetically generated peptide
  VARIANT (1)..(17): Xaa = Any Amino Acid
CCXEWACXXNPACTXGA

SEQ ID NO: 13418 - protein, 17 aa, Artificial Sequence
  Synthetically generated peptide
  VARIANT (1)..(17): Xaa = Any Amino Acid
CCXEWACXXNPACTGXA

SEQ ID NO: 13419 - protein, 16 aa, Artificial Sequence
  Synthetically generated peptide
  VARIANT (1)..(16): Xaa = Any Amino Acid
CCXEWACXNXPACTGA

SEQ ID NO: 13420 - protein, 17 aa, Artificial Sequence
  Synthetically generated peptide
  VARIANT (1)..(17): Xaa = Any Amino Acid
CCXEWACXNXXPACTGA

SEQ ID NO: 13421 - protein, 17 aa, Artificial Sequence
  Synthetically generated peptide
  VARIANT (1)..(17): Xaa = Any Amino Acid
CCXEWACXNXPXACTGA

SEQ ID NO: 13422 - protein, 17 aa, Artificial Sequence
  Synthetically generated peptide
  VARIANT (1)..(17): Xaa = Any Amino Acid
CCXEWACXNXPAXCTGA

SEQ ID NO: 13423 - protein, 17 aa, Artificial Sequence
  Synthetically generated peptide
  VARIANT (1)..(17): Xaa = Any Amino Acid
CCXEWACXNXPACXTGA

SEQ ID NO: 13424 - protein, 17 aa, Artificial Sequence
  Synthetically generated peptide
  VARIANT (1)..(17): Xaa = Any Amino Acid
CCXEWACXNXPACTXGA

SEQ ID NO: 13425 - protein, 17 aa, Artificial Sequence
  Synthetically generated peptide
  VARIANT (1)..(17): Xaa = Any Amino Acid
CCXEWACXNXPACTGXA

SEQ ID NO: 13426 - protein, 16 aa, Artificial Sequence
  Synthetically generated peptide
  VARIANT (1)..(16): Xaa = Any Amino Acid
CCXEWACXNPXACTGA

SEQ ID NO: 13427 - protein, 17 aa, Artificial Sequence
  Synthetically generated peptide
  VARIANT (1)..(17): Xaa = Any Amino Acid
CCXEWACXNPXXACTGA

SEQ ID NO: 13428 - protein, 17 aa, Artificial Sequence
  Synthetically generated peptide
  VARIANT (1)..(17): Xaa = Any Amino Acid
CCXEWACXNPXAXCTGA

SEQ ID NO: 13429 - protein, 17 aa, Artificial Sequence
  Synthetically generated peptide
  VARIANT (1)..(17): Xaa = Any Amino Acid
CCXEWACXNPXACXTGA

SEQ ID NO: 13430 - protein, 17 aa, Artificial Sequence
  Synthetically generated peptide
  VARIANT (1)..(17): Xaa = Any Amino Acid
CCXEWACXNPXACTXGA

SEQ ID NO: 13431 - protein, 17 aa, Artificial Sequence
  Synthetically generated peptide
  VARIANT (1)..(17): Xaa = Any Amino Acid
CCXEWACXNPXACTGXA

SEQ ID NO: 13432 - protein, 16 aa, Artificial Sequence
  Synthetically generated peptide
  VARIANT (1)..(16): Xaa = Any Amino Acid
CCXEWACXNPAXCTGA

SEQ ID NO: 13433 - protein, 17 aa, Artificial Sequence
  Synthetically generated peptide
  VARIANT (1)..(17): Xaa = Any Amino Acid
CCXEWACXNPAXXCTGA

SEQ ID NO: 13434 - protein, 17 aa, Artificial Sequence
  Synthetically generated peptide
  VARIANT (1)..(17): Xaa = Any Amino Acid
CCXEWACXNPAXCXTGA

SEQ ID NO: 13435 - protein, 17 aa, Artificial Sequence
  Synthetically generated peptide
  VARIANT (1)..(17): Xaa = Any Amino Acid
CCXEWACXNPAXCTXGA

SEQ ID NO: 13436 - protein, 17 aa, Artificial Sequence
  Synthetically generated peptide
  VARIANT (1)..(17): Xaa = Any Amino Acid
CCXEWACXNPAXCTGXA

SEQ ID NO: 13437 - protein, 16 aa, Artificial Sequence
  Synthetically generated peptide
  VARIANT (1)..(16): Xaa = Any Amino Acid
CCXEWACXNPACXTGA

SEQ ID NO: 13438 - protein, 17 aa, Artificial Sequence
  Synthetically generated peptide
  VARIANT (1)..(17): Xaa = Any Amino Acid
CCXEWACXNPACXXTGA

SEQ ID NO: 13439 - protein, 17 aa, Artificial Sequence
  Synthetically generated peptide
  VARIANT (1)..(17): Xaa = Any Amino Acid
CCXEWACXNPACXTXGA

SEQ ID NO: 13440 - protein, 17 aa, Artificial Sequence
  Synthetically generated peptide
  VARIANT (1)..(17): Xaa = Any Amino Acid
CCXEWACXNPACXTGXA

SEQ ID NO: 13441 - protein, 16 aa, Artificial Sequence
  Synthetically generated peptide
  VARIANT (1)..(16): Xaa = Any Amino Acid
CCXEWACXNPACTXGA

SEQ ID NO: 13442 - protein, 17 aa, Artificial Sequence
  Synthetically generated peptide
  VARIANT (1)..(17): Xaa = Any Amino Acid
CCXEWACXNPACTXXGA

SEQ ID NO: 13443 - protein, 17 aa, Artificial Sequence
  Synthetically generated peptide
  VARIANT (1)..(17): Xaa = Any Amino Acid
CCXEWACXNPACTXGXA

SEQ ID NO: 13444 - protein, 16 aa, Artificial Sequence
  Synthetically generated peptide
  VARIANT (1)..(16): Xaa = Any Amino Acid
CCXEWACXNPACTGXA

SEQ ID NO: 13445 - protein, 17 aa, Artificial Sequence
  Synthetically generated peptide
  VARIANT (1)..(17): Xaa = Any Amino Acid
CCXEWACXNPACTGXXA

SEQ ID NO: 13446 - protein, 15 aa, Artificial Sequence
  Synthetically generated peptide
  VARIANT (1)..(15): Xaa = Any Amino Acid
CCXEWACNXPACTGA

SEQ ID NO: 13447 - protein, 16 aa, Artificial Sequence
  Synthetically generated peptide
  VARIANT (1)..(16): Xaa = Any Amino Acid
CCXEWACNXXPACTGA

SEQ ID NO: 13448 - protein, 17 aa, Artificial Sequence
  Synthetically generated peptide
  VARIANT (1)..(17): Xaa = Any Amino Acid
CCXEWACNXXXPACTGA

SEQ ID NO: 13449 - protein, 17 aa, Artificial Sequence
  Synthetically generated peptide
  VARIANT (1)..(17): Xaa = Any Amino Acid
CCXEWACNXXPXACTGA

SEQ ID NO: 13450 - protein, 17 aa, Artificial Sequence
  Synthetically generated peptide
  VARIANT (1)..(17): Xaa = Any Amino Acid
CCXEWACNXXPAXCTGA

SEQ ID NO: 13451 - protein, 17 aa, Artificial Sequence
  Synthetically generated peptide
  VARIANT (1)..(17): Xaa = Any Amino Acid
CCXEWACNXXPACXTGA

SEQ ID NO: 13452 - protein, 17 aa, Artificial Sequence
  Synthetically generated peptide
  VARIANT (1)..(17): Xaa = Any Amino Acid
CCXEWACNXXPACTXGA

SEQ ID NO: 13453 - protein, 17 aa, Artificial Sequence
  Synthetically generated peptide
  VARIANT (1)..(17): Xaa = Any Amino Acid
CCXEWACNXXPACTGXA

SEQ ID NO: 13454 - protein, 16 aa, Artificial Sequence
  Synthetically generated peptide
  VARIANT (1)..(16): Xaa = Any Amino Acid
CCXEWACNXPXACTGA

SEQ ID NO: 13455 - protein, 17 aa, Artificial Sequence
  Synthetically generated peptide
  VARIANT (1)..(17): Xaa = Any Amino Acid
CCXEWACNXPXXACTGA

SEQ ID NO: 13456 - protein, 17 aa, Artificial Sequence
  Synthetically generated peptide
  VARIANT (1)..(17): Xaa = Any Amino Acid
CCXEWACNXPXAXCTGA

SEQ ID NO: 13457 - protein, 17 aa, Artificial Sequence
  Synthetically generated peptide
  VARIANT (1)..(17): Xaa = Any Amino Acid
CCXEWACNXPXACXTGA

SEQ ID NO: 13458 - protein, 17 aa, Artificial Sequence
  Synthetically generated peptide
  VARIANT (1)..(17): Xaa = Any Amino Acid
CCXEWACNXPXACTXGA

SEQ ID NO: 13459 - protein, 17 aa, Artificial Sequence
  Synthetically generated peptide
  VARIANT (1)..(17): Xaa = Any Amino Acid
CCXEWACNXPXACTGXA

SEQ ID NO: 13460 - protein, 16 aa, Artificial Sequence
  Synthetically generated peptide
  VARIANT (1)..(16): Xaa = Any Amino Acid
CCXEWACNXPAXCTGA

SEQ ID NO: 13461 - protein, 17 aa, Artificial Sequence
  Synthetically generated peptide
  VARIANT (1)..(17): Xaa = Any Amino Acid
CCXEWACNXPAXXCTGA

SEQ ID NO: 13462 - protein, 17 aa, Artificial Sequence
  Synthetically generated peptide
  VARIANT (1)..(17): Xaa = Any Amino Acid
CCXEWACNXPAXCXTGA

SEQ ID NO: 13463 - protein, 17 aa, Artificial Sequence
  Synthetically generated peptide
  VARIANT (1)..(17): Xaa = Any Amino Acid
CCXEWACNXPAXCTXGA

SEQ ID NO: 13464 - protein, 17 aa, Artificial Sequence
  Synthetically generated peptide
  VARIANT (1)..(17): Xaa = Any Amino Acid
CCXEWACNXPAXCTGXA

SEQ ID NO: 13465 - protein, 16 aa, Artificial Sequence
  Synthetically generated peptide
  VARIANT (1)..(16): Xaa = Any Amino Acid
CCXEWACNXPACXTGA

SEQ ID NO: 13466 - protein, 17 aa, Artificial Sequence
  Synthetically generated peptide
  VARIANT (1)..(17): Xaa = Any Amino Acid
CCXEWACNXPACXXTGA

SEQ ID NO: 13467 - protein, 17 aa, Artificial Sequence
  Synthetically generated peptide
  VARIANT (1)..(17): Xaa = Any Amino Acid
CCXEWACNXPACXTXGA

SEQ ID NO: 13468 - protein, 17 aa, Artificial Sequence
  Synthetically generated peptide
  VARIANT (1)..(17): Xaa = Any Amino Acid
CCXEWACNXPACXTGXA

SEQ ID NO: 13469 - protein, 16 aa, Artificial Sequence
  Synthetically generated peptide
  VARIANT (1)..(16): Xaa = Any Amino Acid
CCXEWACNXPACTXGA

SEQ ID NO: 13470 - protein, 17 aa, Artificial Sequence
  Synthetically generated peptide
  VARIANT (1)..(17): Xaa = Any Amino Acid
CCXEWACNXPACTXXGA

SEQ ID NO: 13471 - protein, 17 aa, Artificial Sequence
  Synthetically generated peptide
  VARIANT (1)..(17): Xaa = Any Amino Acid
CCXEWACNXPACTXGXA

SEQ ID NO: 13472 - protein, 16 aa, Artificial Sequence
  Synthetically generated peptide
  VARIANT (1)..(16): Xaa = Any Amino Acid
CCXEWACNXPACTGXA

SEQ ID NO: 13473 - protein, 17 aa, Artificial Sequence
  Synthetically generated peptide
  VARIANT (1)..(17): Xaa = Any Amino Acid
CCXEWACNXPACTGXXA

SEQ ID NO: 13474 - protein, 15 aa, Artificial Sequence
  Synthetically generated peptide
  VARIANT (1)..(15): Xaa = Any Amino Acid
CCXEWACNPXACTGA

SEQ ID NO: 13475 - protein, 16 aa, Artificial Sequence
  Synthetically generated peptide
  VARIANT (1)..(16): Xaa = Any Amino Acid
CCXEWACNPXXACTGA

SEQ ID NO: 13476 - protein, 17 aa, Artificial Sequence
  Synthetically generated peptide
  VARIANT (1)..(17): Xaa = Any Amino Acid
CCXEWACNPXXXACTGA

SEQ ID NO: 13477 - protein, 17 aa, Artificial Sequence
  Synthetically generated peptide
  VARIANT (1)..(17): Xaa = Any Amino Acid
CCXEWACNPXXAXCTGA

SEQ ID NO: 13478 - protein, 17 aa, Artificial Sequence
  Synthetically generated peptide
  VARIANT (1)..(17): Xaa = Any Amino Acid
CCXEWACNPXXACXTGA

SEQ ID NO: 13479 - protein, 17 aa, Artificial Sequence
  Synthetically generated peptide
  VARIANT (1)..(17): Xaa = Any Amino Acid
CCXEWACNPXXACTXGA

SEQ ID NO: 13480 - protein, 17 aa, Artificial Sequence
  Synthetically generated peptide
  VARIANT (1)..(17): Xaa = Any Amino Acid
CCXEWACNPXXACTGXA

SEQ ID NO: 13481 - protein, 16 aa, Artificial Sequence
  Synthetically generated peptide
  VARIANT (1)..(16): Xaa = Any Amino Acid
CCXEWACNPXAXCTGA

SEQ ID NO: 13482 - protein, 17 aa, Artificial Sequence
  Synthetically generated peptide
  VARIANT (1)..(17): Xaa = Any Amino Acid
CCXEWACNPXAXXCTGA

SEQ ID NO: 13483 - protein, 17 aa, Artificial Sequence
  Synthetically generated peptide
  VARIANT (1)..(17): Xaa = Any Amino Acid
CCXEWACNPXAXCXTGA

SEQ ID NO: 13484 - protein, 17 aa, Artificial Sequence
  Synthetically generated peptide
  VARIANT (1)..(17): Xaa = Any Amino Acid
CCXEWACNPXAXCTXGA

SEQ ID NO: 13485 - protein, 17 aa, Artificial Sequence
  Synthetically generated peptide
  VARIANT (1)..(17): Xaa = Any Amino Acid
CCXEWACNPXAXCTGXA

SEQ ID NO: 13486 - protein, 16 aa, Artificial Sequence
  Synthetically generated peptide
  VARIANT (1)..(16): Xaa = Any Amino Acid
CCXEWACNPXACXTGA

SEQ ID NO: 13487 - protein, 17 aa, Artificial Sequence
  Synthetically generated peptide
  VARIANT (1)..(17): Xaa = Any Amino Acid
CCXEWACNPXACXXTGA

SEQ ID NO: 13488 - protein, 17 aa, Artificial Sequence
  Synthetically generated peptide
  VARIANT (1)..(17): Xaa = Any Amino Acid
CCXEWACNPXACXTXGA

SEQ ID NO: 13489 - protein, 17 aa, Artificial Sequence
  Synthetically generated peptide
  VARIANT (1)..(17): Xaa = Any Amino Acid
CCXEWACNPXACXTGXA

SEQ ID NO: 13490 - protein, 16 aa, Artificial Sequence
  Synthetically generated peptide
  VARIANT (1)..(16): Xaa = Any Amino Acid
CCXEWACNPXACTXGA

SEQ ID NO: 13491 - protein, 17 aa, Artificial Sequence
  Synthetically generated peptide
  VARIANT (1)..(17): Xaa = Any Amino Acid
CCXEWACNPXACTXXGA

SEQ ID NO: 13492 - protein, 17 aa, Artificial Sequence
  Synthetically generated peptide
  VARIANT (1)..(17): Xaa = Any Amino Acid
CCXEWACNPXACTXGXA

SEQ ID NO: 13493 - protein, 16 aa, Artificial Sequence
  Synthetically generated peptide
  VARIANT (1)..(16): Xaa = Any Amino Acid
CCXEWACNPXACTGXA

SEQ ID NO: 13494 - protein, 17 aa, Artificial Sequence
  Synthetically generated peptide
  VARIANT (1)..(17): Xaa = Any Amino Acid
CCXEWACNPXACTGXXA

SEQ ID NO: 13495 - protein, 15 aa, Artificial Sequence
  Synthetically generated peptide
  VARIANT (1)..(15): Xaa = Any Amino Acid
CCXEWACNPAXCTGA

SEQ ID NO: 13496 - protein, 16 aa, Artificial Sequence
  Synthetically generated peptide
  VARIANT (1)..(16): Xaa = Any Amino Acid
CCXEWACNPAXXCTGA

SEQ ID NO: 13497 - protein, 17 aa, Artificial Sequence
  Synthetically generated peptide
  VARIANT (1)..(17): Xaa = Any Amino Acid
CCXEWACNPAXXXCTGA

SEQ ID NO: 13498 - protein, 17 aa, Artificial Sequence
  Synthetically generated peptide
  VARIANT (1)..(17): Xaa = Any Amino Acid
CCXEWACNPAXXCXTGA

SEQ ID NO: 13499 - protein, 17 aa, Artificial Sequence
  Synthetically generated peptide
  VARIANT (1)..(17): Xaa = Any Amino Acid
CCXEWACNPAXXCTXGA

SEQ ID NO: 13500 - protein, 17 aa, Artificial Sequence
  Synthetically generated peptide
  VARIANT (1)..(17): Xaa = Any Amino Acid
CCXEWACNPAXXCTGXA

SEQ ID NO: 13501 - protein, 16 aa, Artificial Sequence
  Synthetically generated peptide
  VARIANT (1)..(16): Xaa = Any Amino Acid
CCXEWACNPAXCXTGA

SEQ ID NO: 13502 - protein, 17 aa, Artificial Sequence
  Synthetically generated peptide
  VARIANT (1)..(17): Xaa = Any Amino Acid
CCXEWACNPAXCXXTGA

SEQ ID NO: 13503 - protein, 17 aa, Artificial Sequence
  Synthetically generated peptide
  VARIANT (1)..(17): Xaa = Any Amino Acid
CCXEWACNPAXCXTXGA

SEQ ID NO: 13504 - protein, 17 aa, Artificial Sequence
  Synthetically generated peptide
  VARIANT (1)..(17): Xaa = Any Amino Acid
CCXEWACNPAXCXTGXA

SEQ ID NO: 13505 - protein, 16 aa, Artificial Sequence
  Synthetically generated peptide
  VARIANT (1)..(16): Xaa = Any Amino Acid
CCXEWACNPAXCTXGA

SEQ ID NO: 13506 - protein, 17 aa, Artificial Sequence
  Synthetically generated peptide
  VARIANT (1)..(17): Xaa = Any Amino Acid
CCXEWACNPAXCTXXGA

SEQ ID NO: 13507 - protein, 17 aa, Artificial Sequence
  Synthetically generated peptide
  VARIANT (1)..(17): Xaa = Any Amino Acid
CCXEWACNPAXCTXGXA

SEQ ID NO: 13508 - protein, 16 aa, Artificial Sequence
  Synthetically generated peptide
  VARIANT (1)..(16): Xaa = Any Amino Acid
CCXEWACNPAXCTGXA

SEQ ID NO: 13509 - protein, 17 aa, Artificial Sequence
  Synthetically generated peptide
  VARIANT (1)..(17): Xaa = Any Amino Acid
CCXEWACNPAXCTGXXA

SEQ ID NO: 13510 - protein, 15 aa, Artificial Sequence
  Synthetically generated peptide
  VARIANT (1)..(15): Xaa = Any Amino Acid
CCXEWACNPACXTGA

SEQ ID NO: 13511 - protein, 16 aa, Artificial Sequence
  Synthetically generated peptide
  VARIANT (1)..(16): Xaa = Any Amino Acid
CCXEWACNPACXXTGA

SEQ ID NO: 13512 - protein, 17 aa, Artificial Sequence
  Synthetically generated peptide
  VARIANT (1)..(17): Xaa = Any Amino Acid
CCXEWACNPACXXXTGA

SEQ ID NO: 13513 - protein, 17 aa, Artificial Sequence
  Synthetically generated peptide
  VARIANT (1)..(17): Xaa = Any Amino Acid
CCXEWACNPACXXTXGA

SEQ ID NO: 13514 - protein, 17 aa, Artificial Sequence
  Synthetically generated peptide
  VARIANT (1)..(17): Xaa = Any Amino Acid
CCXEWACNPACXXTGXA

SEQ ID NO: 13515 - protein, 16 aa, Artificial Sequence
  Synthetically generated peptide
  VARIANT (1)..(16): Xaa = Any Amino Acid
CCXEWACNPACXTXGA

SEQ ID NO: 13516 - protein, 17 aa, Artificial Sequence
  Synthetically generated peptide
  VARIANT (1)..(17): Xaa = Any Amino Acid
CCXEWACNPACXTXXGA

SEQ ID NO: 13517 - protein, 17 aa, Artificial Sequence
  Synthetically generated peptide
  VARIANT (1)..(17): Xaa = Any Amino Acid
CCXEWACNPACXTXGXA

SEQ ID NO: 13518 - protein, 16 aa, Artificial Sequence
  Synthetically generated peptide
  VARIANT (1)..(16): Xaa = Any Amino Acid
CCXEWACNPACXTGXA

SEQ ID NO: 13519 - protein, 17 aa, Artificial Sequence
  Synthetically generated peptide
  VARIANT (1)..(17): Xaa = Any Amino Acid
CCXEWACNPACXTGXXA

SEQ ID NO: 13520 - protein, 15 aa, Artificial Sequence
  Synthetically generated peptide
  VARIANT (1)..(15): Xaa = Any Amino Acid
CCXEWACNPACTXGA

SEQ ID NO: 13521 - protein, 16 aa, Artificial Sequence
  Synthetically generated peptide
  VARIANT (1)..(16): Xaa = Any Amino Acid
CCXEWACNPACTXXGA

SEQ ID NO: 13522 - protein, 17 aa, Artificial Sequence
  Synthetically generated peptide
  VARIANT (1)..(17): Xaa = Any Amino Acid
CCXEWACNPACTXXXGA

SEQ ID NO: 13523 - protein, 17 aa, Artificial Sequence
  Synthetically generated peptide
  VARIANT (1)..(17): Xaa = Any Amino Acid
CCXEWACNPACTXXGXA

SEQ ID NO: 13524 - protein, 16 aa, Artificial Sequence
  Synthetically generated peptide
  VARIANT (1)..(16): Xaa = Any Amino Acid
CCXEWACNPACTXGXA

SEQ ID NO: 13525 - protein, 17 aa, Artificial Sequence
  Synthetically generated peptide
  VARIANT (1)..(17): Xaa = Any Amino Acid
CCXEWACNPACTXGXXA

SEQ ID NO: 13526 - protein, 15 aa, Artificial Sequence
  Synthetically generated peptide
  VARIANT (1)..(15): Xaa = Any Amino Acid
CCXEWACNPACTGXA

SEQ ID NO: 13527 - protein, 16 aa, Artificial Sequence
  Synthetically generated peptide
  VARIANT (1)..(16): Xaa = Any Amino Acid
CCXEWACNPACTGXXA

SEQ ID NO: 13528 - protein, 17 aa, Artificial Sequence
  Synthetically generated peptide
  VARIANT (1)..(17): Xaa = Any Amino Acid
CCXEWACNPACTGXXXA

SEQ ID NO: 13529 - protein, 14 aa, Artificial Sequence
  Synthetically generated peptide
  VARIANT (1)..(14): Xaa = Any Amino Acid
CCEXWACNPACTGA

SEQ ID NO: 13530 - protein, 15 aa, Artificial Sequence
  Synthetically generated peptide
  VARIANT (1)..(15): Xaa = Any Amino Acid
CCEXXWACNPACTGA

SEQ ID NO: 13531 - protein, 16 aa, Artificial Sequence
  Synthetically generated peptide
  VARIANT (1)..(16): Xaa = Any Amino Acid
CCEXXXWACNPACTGA

SEQ ID NO: 13532 - protein, 17 aa, Artificial Sequence
  Synthetically generated peptide
  VARIANT (1)..(17): Xaa = Any Amino Acid
CCEXXXXWACNPACTGA

SEQ ID NO: 13533 - protein, 17 aa, Artificial Sequence
  Synthetically generated peptide
  VARIANT (1)..(17): Xaa = Any Amino Acid
CCEXXXWXACNPACTGA

SEQ ID NO: 13534 - protein, 17 aa, Artificial Sequence
  Synthetically generated peptide
  VARIANT (1)..(17): Xaa = Any Amino Acid
CCEXXXWACXNPACTGA

SEQ ID NO: 13535 - protein, 17 aa, Artificial Sequence
  Synthetically generated peptide
  VARIANT (1)..(17): Xaa = Any Amino Acid
CCEXXXWACNXPACTGA

SEQ ID NO: 13536 - protein, 17 aa, Artificial Sequence
  Synthetically generated peptide
  VARIANT (1)..(17): Xaa = Any Amino Acid
CCEXXXWACNPXACTGA

SEQ ID NO: 13537 - protein, 17 aa, Artificial Sequence
  Synthetically generated peptide
  VARIANT (1)..(17): Xaa = Any Amino Acid
CCEXXXWACNPAXCTGA

SEQ ID NO: 13538 - protein, 17 aa, Artificial Sequence
  Synthetically generated peptide
  VARIANT (1)..(17): Xaa = Any Amino Acid
CCEXXXWACNPACXTGA

SEQ ID NO: 13539 - protein, 17 aa, Artificial Sequence
  Synthetically generated peptide
  VARIANT (1)..(17): Xaa = Any Amino Acid
CCEXXXWACNPACTXGA

SEQ ID NO: 13540 - protein, 17 aa, Artificial Sequence
  Synthetically generated peptide
  VARIANT (1)..(17): Xaa = Any Amino Acid
CCEXXXWACNPACTGXA

SEQ ID NO: 13541 - protein, 16 aa, Artificial Sequence
  Synthetically generated peptide
  VARIANT (1)..(16): Xaa = Any Amino Acid
CCEXXWXACNPACTGA

SEQ ID NO: 13542 - protein, 17 aa, Artificial Sequence
  Synthetically generated peptide
  VARIANT (1)..(17): Xaa = Any Amino Acid
CCEXXWXXACNPACTGA

SEQ ID NO: 13543 - protein, 17 aa, Artificial Sequence
  Synthetically generated peptide
  VARIANT (1)..(17): Xaa = Any Amino Acid
CCEXXWXACXNPACTGA

SEQ ID NO: 13544 - protein, 17 aa, Artificial Sequence
  Synthetically generated peptide
  VARIANT (1)..(17): Xaa = Any Amino Acid
CCEXXWXACNXPACTGA

SEQ ID NO: 13545 - protein, 17 aa, Artificial Sequence
  Synthetically generated peptide
  VARIANT (1)..(17): Xaa = Any Amino Acid
CCEXXWXACNPXACTGA

SEQ ID NO: 13546 - protein, 17 aa, Artificial Sequence
  Synthetically generated peptide
  VARIANT (1)..(17): Xaa = Any Amino Acid
CCEXXWXACNPAXCTGA

SEQ ID NO: 13547 - protein, 17 aa, Artificial Sequence
  Synthetically generated peptide
  VARIANT (1)..(17): Xaa = Any Amino Acid
CCEXXWXACNPACXTGA

SEQ ID NO: 13548 - protein, 17 aa, Artificial Sequence
  Synthetically generated peptide
  VARIANT (1)..(17): Xaa = Any Amino Acid
CCEXXWXACNPACTXGA

SEQ ID NO: 13549 - protein, 17 aa, Artificial Sequence
  Synthetically generated peptide
  VARIANT (1)..(17): Xaa = Any Amino Acid
CCEXXWXACNPACTGXA

SEQ ID NO: 13550 - protein, 16 aa, Artificial Sequence
  Synthetically generated peptide
  VARIANT (1)..(16): Xaa = Any Amino Acid
CCEXXWACXNPACTGA

SEQ ID NO: 13551 - protein, 17 aa, Artificial Sequence
  Synthetically generated peptide
  VARIANT (1)..(17): Xaa = Any Amino Acid
CCEXXWACXXNPACTGA

SEQ ID NO: 13552 - protein, 17 aa, Artificial Sequence
  Synthetically generated peptide
  VARIANT (1)..(17): Xaa = Any Amino Acid
CCEXXWACXNXPACTGA

SEQ ID NO: 13553 - protein, 17 aa, Artificial Sequence
  Synthetically generated peptide
  VARIANT (1)..(17): Xaa = Any Amino Acid
CCEXXWACXNPXACTGA

SEQ ID NO: 13554 - protein, 17 aa, Artificial Sequence
  Synthetically generated peptide
  VARIANT (1)..(17): Xaa = Any Amino Acid
CCEXXWACXNPAXCTGA

SEQ ID NO: 13555 - protein, 17 aa, Artificial Sequence
  Synthetically generated peptide
  VARIANT (1)..(17): Xaa = Any Amino Acid
CCEXXWACXNPACXTGA

SEQ ID NO: 13556 - protein, 17 aa, Artificial Sequence
  Synthetically generated peptide
  VARIANT (1)..(17): Xaa = Any Amino Acid
CCEXXWACXNPACTXGA

SEQ ID NO: 13557 - protein, 17 aa, Artificial Sequence
  Synthetically generated peptide
  VARIANT (1)..(17): Xaa = Any Amino Acid
CCEXXWACXNPACTGXA

SEQ ID NO: 13558 - protein, 16 aa, Artificial Sequence
  Synthetically generated peptide
  VARIANT (1)..(16): Xaa = Any Amino Acid
CCEXXWACNXPACTGA

SEQ ID NO: 13559 - protein, 17 aa, Artificial Sequence
  Synthetically generated peptide
  VARIANT (1)..(17): Xaa = Any Amino Acid
CCEXXWACNXXPACTGA

SEQ ID NO: 13560 - protein, 17 aa, Artificial Sequence
  Synthetically generated peptide
  VARIANT (1)..(17): Xaa = Any Amino Acid
CCEXXWACNXPXACTGA

SEQ ID NO: 13561 - protein, 17 aa, Artificial Sequence
  Synthetically generated peptide
  VARIANT (1)..(17): Xaa = Any Amino Acid
CCEXXWACNXPAXCTGA

SEQ ID NO: 13562 - protein, 17 aa, Artificial Sequence
  Synthetically generated peptide
  VARIANT (1)..(17): Xaa = Any Amino Acid
CCEXXWACNXPACXTGA

SEQ ID NO: 13563 - protein, 17 aa, Artificial Sequence
  Synthetically generated peptide
  VARIANT (1)..(17): Xaa = Any Amino Acid
CCEXXWACNXPACTXGA

SEQ ID NO: 13564 - protein, 17 aa, Artificial Sequence
  Synthetically generated peptide
  VARIANT (1)..(17): Xaa = Any Amino Acid
CCEXXWACNXPACTGXA

SEQ ID NO: 13565 - protein, 16 aa, Artificial Sequence
  Synthetically generated peptide
  VARIANT (1)..(16): Xaa = Any Amino Acid
CCEXXWACNPXACTGA

SEQ ID NO: 13566 - protein, 17 aa, Artificial Sequence
  Synthetically generated peptide
  VARIANT (1)..(17): Xaa = Any Amino Acid
CCEXXWACNPXXACTGA

SEQ ID NO: 13567 - protein, 17 aa, Artificial Sequence
  Synthetically generated peptide
  VARIANT (1)..(17): Xaa = Any Amino Acid
CCEXXWACNPXAXCTGA

SEQ ID NO: 13568 - protein, 17 aa, Artificial Sequence
  Synthetically generated peptide
  VARIANT (1)..(17): Xaa = Any Amino Acid
CCEXXWACNPXACXTGA

SEQ ID NO: 13569 - protein, 17 aa, Artificial Sequence
  Synthetically generated peptide
  VARIANT (1)..(17): Xaa = Any Amino Acid
CCEXXWACNPXACTXGA

SEQ ID NO: 13570 - protein, 17 aa, Artificial Sequence
  Synthetically generated peptide
  VARIANT (1)..(17): Xaa = Any Amino Acid
CCEXXWACNPXACTGXA

SEQ ID NO: 13571 - protein, 16 aa, Artificial Sequence
  Synthetically generated peptide
  VARIANT (1)..(16): Xaa = Any Amino Acid
CCEXXWACNPAXCTGA

SEQ ID NO: 13572 - protein, 17 aa, Artificial Sequence
  Synthetically generated peptide
  VARIANT (1)..(17): Xaa = Any Amino Acid
CCEXXWACNPAXXCTGA

SEQ ID NO: 13573 - protein, 17 aa, Artificial Sequence
  Synthetically generated peptide
  VARIANT (1)..(17): Xaa = Any Amino Acid
CCEXXWACNPAXCXTGA

SEQ ID NO: 13574 - protein, 17 aa, Artificial Sequence
  Synthetically generated peptide
  VARIANT (1)..(17): Xaa = Any Amino Acid
CCEXXWACNPAXCTXGA

SEQ ID NO: 13575 - protein, 17 aa, Artificial Sequence
  Synthetically generated peptide
  VARIANT (1)..(17): Xaa = Any Amino Acid
CCEXXWACNPAXCTGXA

SEQ ID NO: 13576 - protein, 16 aa, Artificial Sequence
  Synthetically generated peptide
  VARIANT (1)..(16): Xaa = Any Amino Acid
CCEXXWACNPACXTGA

SEQ ID NO: 13577 - protein, 17 aa, Artificial Sequence
  Synthetically generated peptide
  VARIANT (1)..(17): Xaa = Any Amino Acid
CCEXXWACNPACXXTGA

SEQ ID NO: 13578 - protein, 17 aa, Artificial Sequence
  Synthetically generated peptide
  VARIANT (1)..(17): Xaa = Any Amino Acid
CCEXXWACNPACXTXGA

SEQ ID NO: 13579 - protein, 17 aa, Artificial Sequence
  Synthetically generated peptide
  VARIANT (1)..(17): Xaa = Any Amino Acid
CCEXXWACNPACXTGXA

SEQ ID NO: 13580 - protein, 16 aa, Artificial Sequence
  Synthetically generated peptide
  VARIANT (1)..(16): Xaa = Any Amino Acid
CCEXXWACNPACTXGA

SEQ ID NO: 13581 - protein, 17 aa, Artificial Sequence
  Synthetically generated peptide
  VARIANT (1)..(17): Xaa = Any Amino Acid
CCEXXWACNPACTXXGA

SEQ ID NO: 13582 - protein, 17 aa, Artificial Sequence
  Synthetically generated peptide
  VARIANT (1)..(17): Xaa = Any Amino Acid
CCEXXWACNPACTXGXA

SEQ ID NO: 13583 - protein, 16 aa, Artificial Sequence
  Synthetically generated peptide
  VARIANT (1)..(16): Xaa = Any Amino Acid
CCEXXWACNPACTGXA

SEQ ID NO: 13584 - protein, 17 aa, Artificial Sequence
  Synthetically generated peptide
  VARIANT (1)..(17): Xaa = Any Amino Acid
CCEXXWACNPACTGXXA

SEQ ID NO: 13585 - protein, 15 aa, Artificial Sequence
  Synthetically generated peptide
  VARIANT (1)..(15): Xaa = Any Amino Acid
CCEXWXACNPACTGA

SEQ ID NO: 13586 - protein, 16 aa, Artificial Sequence
  Synthetically generated peptide
  VARIANT (1)..(16): Xaa = Any Amino Acid
CCEXWXXACNPACTGA

SEQ ID NO: 13587 - protein, 17 aa, Artificial Sequence
  Synthetically generated peptide
  VARIANT (1)..(17): Xaa = Any Amino Acid
CCEXWXXXACNPACTGA

SEQ ID NO: 13588 - protein, 17 aa, Artificial Sequence
  Synthetically generated peptide
  VARIANT (1)..(17): Xaa = Any Amino Acid
CCEXWXXACXNPACTGA

SEQ ID NO: 13589 - protein, 17 aa, Artificial Sequence
  Synthetically generated peptide
  VARIANT (1)..(17): Xaa = Any Amino Acid
CCEXWXXACNXPACTGA

SEQ ID NO: 13590 - protein, 17 aa, Artificial Sequence
  Synthetically generated peptide
  VARIANT (1)..(17): Xaa = Any Amino Acid
CCEXWXXACNPXACTGA

SEQ ID NO: 13591 - protein, 17 aa, Artificial Sequence
  Synthetically generated peptide
  VARIANT (1)..(17): Xaa = Any Amino Acid
CCEXWXXACNPAXCTGA

SEQ ID NO: 13592 - protein, 17 aa, Artificial Sequence
  Synthetically generated peptide
  VARIANT (1)..(17): Xaa = Any Amino Acid
CCEXWXXACNPACXTGA

SEQ ID NO: 13593 - protein, 17 aa, Artificial Sequence
  Synthetically generated peptide
  VARIANT (1)..(17): Xaa = Any Amino Acid
CCEXWXXACNPACTXGA

SEQ ID NO: 13594 - protein, 17 aa, Artificial Sequence
  Synthetically generated peptide
  VARIANT (1)..(17): Xaa = Any Amino Acid
CCEXWXXACNPACTGXA

SEQ ID NO: 13595 - protein, 16 aa, Artificial Sequence
  Synthetically generated peptide
  VARIANT (1)..(16): Xaa = Any Amino Acid
CCEXWXACXNPACTGA

SEQ ID NO: 13596 - protein, 17 aa, Artificial Sequence
  Synthetically generated peptide
  VARIANT (1)..(17): Xaa = Any Amino Acid
CCEXWXACXXNPACTGA

SEQ ID NO: 13597 - protein, 17 aa, Artificial Sequence
  Synthetically generated peptide
  VARIANT (1)..(17): Xaa = Any Amino Acid
CCEXWXACXNXPACTGA

SEQ ID NO: 13598 - protein, 17 aa, Artificial Sequence
  Synthetically generated peptide
  VARIANT (1)..(17): Xaa = Any Amino Acid
CCEXWXACXNPXACTGA

SEQ ID NO: 13599 - protein, 17 aa, Artificial Sequence
  Synthetically generated peptide
  VARIANT (1)..(17): Xaa = Any Amino Acid
CCEXWXACXNPAXCTGA

SEQ ID NO: 13600 - protein, 17 aa, Artificial Sequence
  Synthetically generated peptide
  VARIANT (1)..(17): Xaa = Any Amino Acid
CCEXWXACXNPACXTGA

SEQ ID NO: 13601 - protein, 17 aa, Artificial Sequence
  Synthetically generated peptide
  VARIANT (1)..(17): Xaa = Any Amino Acid
CCEXWXACXNPACTXGA

SEQ ID NO: 13602 - protein, 17 aa, Artificial Sequence
  Synthetically generated peptide
  VARIANT (1)..(17): Xaa = Any Amino Acid
CCEXWXACXNPACTGXA

SEQ ID NO: 13603 - protein, 16 aa, Artificial Sequence
  Synthetically generated peptide
  VARIANT (1)..(16): Xaa = Any Amino Acid
CCEXWXACNXPACTGA

SEQ ID NO: 13604 - protein, 17 aa, Artificial Sequence
  Synthetically generated peptide
  VARIANT (1)..(17): Xaa = Any Amino Acid
CCEXWXACNXXPACTGA

SEQ ID NO: 13605 - protein, 17 aa, Artificial Sequence
  Synthetically generated peptide
  VARIANT (1)..(17): Xaa = Any Amino Acid
CCEXWXACNXPXACTGA

SEQ ID NO: 13606 - protein, 17 aa, Artificial Sequence
  Synthetically generated peptide
  VARIANT (1)..(17): Xaa = Any Amino Acid
CCEXWXACNXPAXCTGA

SEQ ID NO: 13607 - protein, 17 aa, Artificial Sequence
  Synthetically generated peptide
  VARIANT (1)..(17): Xaa = Any Amino Acid
CCEXWXACNXPACXTGA

SEQ ID NO: 13608 - protein, 17 aa, Artificial Sequence
  Synthetically generated peptide
  VARIANT (1)..(17): Xaa = Any Amino Acid
CCEXWXACNXPACTXGA

SEQ ID NO: 13609 - protein, 17 aa, Artificial Sequence
  Synthetically generated peptide
  VARIANT (1)..(17): Xaa = Any Amino Acid
CCEXWXACNXPACTGXA

SEQ ID NO: 13610 - protein, 16 aa, Artificial Sequence
  Synthetically generated peptide
  VARIANT (1)..(16): Xaa = Any Amino Acid
CCEXWXACNPXACTGA

SEQ ID NO: 13611 - protein, 17 aa, Artificial Sequence
  Synthetically generated peptide
  VARIANT (1)..(17): Xaa = Any Amino Acid
CCEXWXACNPXXACTGA

SEQ ID NO: 13612 - protein, 17 aa, Artificial Sequence
  Synthetically generated peptide
  VARIANT (1)..(17): Xaa = Any Amino Acid
CCEXWXACNPXAXCTGA

SEQ ID NO: 13613 - protein, 17 aa, Artificial Sequence
  Synthetically generated peptide
  VARIANT (1)..(17): Xaa = Any Amino Acid
CCEXWXACNPXACXTGA

SEQ ID NO: 13614 - protein, 17 aa, Artificial Sequence
  Synthetically generated peptide
  VARIANT (1)..(17): Xaa = Any Amino Acid
CCEXWXACNPXACTXGA

SEQ ID NO: 13615 - protein, 17 aa, Artificial Sequence
  Synthetically generated peptide
  VARIANT (1)..(17): Xaa = Any Amino Acid
CCEXWXACNPXACTGXA

SEQ ID NO: 13616 - protein, 16 aa, Artificial Sequence
  Synthetically generated peptide
  VARIANT (1)..(16): Xaa = Any Amino Acid
CCEXWXACNPAXCTGA

SEQ ID NO: 13617 - protein, 17 aa, Artificial Sequence
  Synthetically generated peptide
  VARIANT (1)..(17): Xaa = Any Amino Acid
CCEXWXACNPAXXCTGA

SEQ ID NO: 13618 - protein, 17 aa, Artificial Sequence
  Synthetically generated peptide
  VARIANT (1)..(17): Xaa = Any Amino Acid
CCEXWXACNPAXCXTGA

SEQ ID NO: 13619 - protein, 17 aa, Artificial Sequence
  Synthetically generated peptide
  VARIANT (1)..(17): Xaa = Any Amino Acid
CCEXWXACNPAXCTXGA

SEQ ID NO: 13620 - protein, 17 aa, Artificial Sequence
  Synthetically generated peptide
  VARIANT (1)..(17): Xaa = Any Amino Acid
CCEXWXACNPAXCTGXA

SEQ ID NO: 13621 - protein, 16 aa, Artificial Sequence
  Synthetically generated peptide
  VARIANT (1)..(16): Xaa = Any Amino Acid
CCEXWXACNPACXTGA

SEQ ID NO: 13622 - protein, 17 aa, Artificial Sequence
  Synthetically generated peptide
  VARIANT (1)..(17): Xaa = Any Amino Acid
CCEXWXACNPACXXTGA

SEQ ID NO: 13623 - protein, 17 aa, Artificial Sequence
  Synthetically generated peptide
  VARIANT (1)..(17): Xaa = Any Amino Acid
CCEXWXACNPACXTXGA

SEQ ID NO: 13624 - protein, 17 aa, Artificial Sequence
  Synthetically generated peptide
  VARIANT (1)..(17): Xaa = Any Amino Acid
CCEXWXACNPACXTGXA

SEQ ID NO: 13625 - protein, 16 aa, Artificial Sequence
  Synthetically generated peptide
  VARIANT (1)..(16): Xaa = Any Amino Acid
CCEXWXACNPACTXGA

SEQ ID NO: 13626 - protein, 17 aa, Artificial Sequence
  Synthetically generated peptide
  VARIANT (1)..(17): Xaa = Any Amino Acid
CCEXWXACNPACTXXGA

SEQ ID NO: 13627 - protein, 17 aa, Artificial Sequence
  Synthetically generated peptide
  VARIANT (1)..(17): Xaa = Any Amino Acid
CCEXWXACNPACTXGXA

SEQ ID NO: 13628 - protein, 16 aa, Artificial Sequence
  Synthetically generated peptide
  VARIANT (1)..(16): Xaa = Any Amino Acid
CCEXWXACNPACTGXA

SEQ ID NO: 13629 - protein, 17 aa, Artificial Sequence
  Synthetically generated peptide
  VARIANT (1)..(17): Xaa = Any Amino Acid
CCEXWXACNPACTGXXA

SEQ ID NO: 13630 - protein, 15 aa, Artificial Sequence
  Synthetically generated peptide
  VARIANT (1)..(15): Xaa = Any Amino Acid
CCEXWACXNPACTGA

SEQ ID NO: 13631 - protein, 16 aa, Artificial Sequence
  Synthetically generated peptide
  VARIANT (1)..(16): Xaa = Any Amino Acid
CCEXWACXXNPACTGA

SEQ ID NO: 13632 - protein, 17 aa, Artificial Sequence
  Synthetically generated peptide
  VARIANT (1)..(17): Xaa = Any Amino Acid
CCEXWACXXXNPACTGA

SEQ ID NO: 13633 - protein, 17 aa, Artificial Sequence
  Synthetically generated peptide
  VARIANT (1)..(17): Xaa = Any Amino Acid
CCEXWACXXNXPACTGA

SEQ ID NO: 13634 - protein, 17 aa, Artificial Sequence
  Synthetically generated peptide
  VARIANT (1)..(17): Xaa = Any Amino Acid
CCEXWACXXNPXACTGA

SEQ ID NO: 13635 - protein, 17 aa, Artificial Sequence
  Synthetically generated peptide
  VARIANT (1)..(17): Xaa = Any Amino Acid
CCEXWACXXNPAXCTGA

SEQ ID NO: 13636 - protein, 17 aa, Artificial Sequence
  Synthetically generated peptide
  VARIANT (1)..(17): Xaa = Any Amino Acid
CCEXWACXXNPACXTGA

SEQ ID NO: 13637 - protein, 17 aa, Artificial Sequence
  Synthetically generated peptide
  VARIANT (1)..(17): Xaa = Any Amino Acid
CCEXWACXXNPACTXGA

SEQ ID NO: 13638 - protein, 17 aa, Artificial Sequence
  Synthetically generated peptide
  VARIANT (1)..(17): Xaa = Any Amino Acid
CCEXWACXXNPACTGXA

SEQ ID NO: 13639 - protein, 16 aa, Artificial Sequence
  Synthetically generated peptide
  VARIANT (1)..(16): Xaa = Any Amino Acid
CCEXWACXNXPACTGA

SEQ ID NO: 13640 - protein, 17 aa, Artificial Sequence
  Synthetically generated peptide
  VARIANT (1)..(17): Xaa = Any Amino Acid
CCEXWACXNXXPACTGA

SEQ ID NO: 13641 - protein, 17 aa, Artificial Sequence
  Synthetically generated peptide
  VARIANT (1)..(17): Xaa = Any Amino Acid
CCEXWACXNXPXACTGA

SEQ ID NO: 13642 - protein, 17 aa, Artificial Sequence
  Synthetically generated peptide
  VARIANT (1)..(17): Xaa = Any Amino Acid
CCEXWACXNXPAXCTGA

SEQ ID NO: 13643 - protein, 17 aa, Artificial Sequence
  Synthetically generated peptide
  VARIANT (1)..(17): Xaa = Any Amino Acid
CCEXWACXNXPACXTGA

SEQ ID NO: 13644 - protein, 17 aa, Artificial Sequence
  Synthetically generated peptide
  VARIANT (1)..(17): Xaa = Any Amino Acid
CCEXWACXNXPACTXGA

SEQ ID NO: 13645 - protein, 17 aa, Artificial Sequence
  Synthetically generated peptide
  VARIANT (1)..(17): Xaa = Any Amino Acid
CCEXWACXNXPACTGXA

SEQ ID NO: 13646 - protein, 16 aa, Artificial Sequence
  Synthetically generated peptide
  VARIANT (1)..(16): Xaa = Any Amino Acid
CCEXWACXNPXACTGA

SEQ ID NO: 13647 - protein, 17 aa, Artificial Sequence
  Synthetically generated peptide
  VARIANT (1)..(17): Xaa = Any Amino Acid
CCEXWACXNPXXACTGA

SEQ ID NO: 13648 - protein, 17 aa, Artificial Sequence
  Synthetically generated peptide
  VARIANT (1)..(17): Xaa = Any Amino Acid
CCEXWACXNPXAXCTGA

SEQ ID NO: 13649 - protein, 17 aa, Artificial Sequence
  Synthetically generated peptide
  VARIANT (1)..(17): Xaa = Any Amino Acid
CCEXWACXNPXACXTGA

SEQ ID NO: 13650 - protein, 17 aa, Artificial Sequence
  Synthetically generated peptide
  VARIANT (1)..(17): Xaa = Any Amino Acid
CCEXWACXNPXACTXGA

SEQ ID NO: 13651 - protein, 17 aa, Artificial Sequence
  Synthetically generated peptide
  VARIANT (1)..(17): Xaa = Any Amino Acid
CCEXWACXNPXACTGXA

SEQ ID NO: 13652 - protein, 16 aa, Artificial Sequence
  Synthetically generated peptide
  VARIANT (1)..(16): Xaa = Any Amino Acid
CCEXWACXNPAXCTGA

SEQ ID NO: 13653 - protein, 17 aa, Artificial Sequence
  Synthetically generated peptide
  VARIANT (1)..(17): Xaa = Any Amino Acid
CCEXWACXNPAXXCTGA

SEQ ID NO: 13654 - protein, 17 aa, Artificial Sequence
  Synthetically generated peptide
  VARIANT (1)..(17): Xaa = Any Amino Acid
CCEXWACXNPAXCXTGA

SEQ ID NO: 13655 - protein, 17 aa, Artificial Sequence
  Synthetically generated peptide
  VARIANT (1)..(17): Xaa = Any Amino Acid
CCEXWACXNPAXCTXGA

SEQ ID NO: 13656 - protein, 17 aa, Artificial Sequence
  Synthetically generated peptide
  VARIANT (1)..(17): Xaa = Any Amino Acid
CCEXWACXNPAXCTGXA

SEQ ID NO: 13657 - protein, 16 aa, Artificial Sequence
  Synthetically generated peptide
  VARIANT (1)..(16): Xaa = Any Amino Acid
CCEXWACXNPACXTGA

SEQ ID NO: 13658 - protein, 17 aa, Artificial Sequence
  Synthetically generated peptide
  VARIANT (1)..(17): Xaa = Any Amino Acid
CCEXWACXNPACXXTGA

SEQ ID NO: 13659 - protein, 17 aa, Artificial Sequence
  Synthetically generated peptide
  VARIANT (1)..(17): Xaa = Any Amino Acid
CCEXWACXNPACXTXGA

SEQ ID NO: 13660 - protein, 17 aa, Artificial Sequence
  Synthetically generated peptide
  VARIANT (1)..(17): Xaa = Any Amino Acid
CCEXWACXNPACXTGXA

SEQ ID NO: 13661 - protein, 16 aa, Artificial Sequence
  Synthetically generated peptide
  VARIANT (1)..(16): Xaa = Any Amino Acid
CCEXWACXNPACTXGA

SEQ ID NO: 13662 - protein, 17 aa, Artificial Sequence
  Synthetically generated peptide
  VARIANT (1)..(17): Xaa = Any Amino Acid
CCEXWACXNPACTXXGA

SEQ ID NO: 13663 - protein, 17 aa, Artificial Sequence
  Synthetically generated peptide
  VARIANT (1)..(17): Xaa = Any Amino Acid
CCEXWACXNPACTXGXA

SEQ ID NO: 13664 - protein, 16 aa, Artificial Sequence
  Synthetically generated peptide
  VARIANT (1)..(16): Xaa = Any Amino Acid
CCEXWACXNPACTGXA

SEQ ID NO: 13665 - protein, 17 aa, Artificial Sequence
  Synthetically generated peptide
  VARIANT (1)..(17): Xaa = Any Amino Acid
CCEXWACXNPACTGXXA

SEQ ID NO: 13666 - protein, 15 aa, Artificial Sequence
  Synthetically generated peptide
  VARIANT (1)..(15): Xaa = Any Amino Acid
CCEXWACNXPACTGA

SEQ ID NO: 13667 - protein, 16 aa, Artificial Sequence
  Synthetically generated peptide
  VARIANT (1)..(16): Xaa = Any Amino Acid
CCEXWACNXXPACTGA

SEQ ID NO: 13668 - protein, 17 aa, Artificial Sequence
  Synthetically generated peptide
  VARIANT (1)..(17): Xaa = Any Amino Acid
CCEXWACNXXXPACTGA

SEQ ID NO: 13669 - protein, 17 aa, Artificial Sequence
  Synthetically generated peptide
  VARIANT (1)..(17): Xaa = Any Amino Acid
CCEXWACNXXPXACTGA

SEQ ID NO: 13670 - protein, 17 aa, Artificial Sequence
  Synthetically generated peptide
  VARIANT (1)..(17): Xaa = Any Amino Acid
CCEXWACNXXPAXCTGA

SEQ ID NO: 13671 - protein, 17 aa, Artificial Sequence
  Synthetically generated peptide
  VARIANT (1)..(17): Xaa = Any Amino Acid
CCEXWACNXXPACXTGA

SEQ ID NO: 13672 - protein, 17 aa, Artificial Sequence
  Synthetically generated peptide
  VARIANT (1)..(17): Xaa = Any Amino Acid
CCEXWACNXXPACTXGA

SEQ ID NO: 13673 - protein, 17 aa, Artificial Sequence
  Synthetically generated peptide
  VARIANT (1)..(17): Xaa = Any Amino Acid
CCEXWACNXXPACTGXA

SEQ ID NO: 13674 - protein, 16 aa, Artificial Sequence
  Synthetically generated peptide
  VARIANT (1)..(16): Xaa = Any Amino Acid
CCEXWACNXPXACTGA

SEQ ID NO: 13675 - protein, 17 aa, Artificial Sequence
  Synthetically generated peptide
  VARIANT (1)..(17): Xaa = Any Amino Acid
CCEXWACNXPXXACTGA

SEQ ID NO: 13676 - protein, 17 aa, Artificial Sequence
  Synthetically generated peptide
  VARIANT (1)..(17): Xaa = Any Amino Acid
CCEXWACNXPXAXCTGA

SEQ ID NO: 13677 - protein, 17 aa, Artificial Sequence
  Synthetically generated peptide
  VARIANT (1)..(17): Xaa = Any Amino Acid
CCEXWACNXPXACXTGA

SEQ ID NO: 13678 - protein, 17 aa, Artificial Sequence
  Synthetically generated peptide
  VARIANT (1)..(17): Xaa = Any Amino Acid
CCEXWACNXPXACTXGA

SEQ ID NO: 13679 - protein, 17 aa, Artificial Sequence
  Synthetically generated peptide
  VARIANT (1)..(17): Xaa = Any Amino Acid
CCEXWACNXPXACTGXA

SEQ ID NO: 13680 - protein, 16 aa, Artificial Sequence
  Synthetically generated peptide
  VARIANT (1)..(16): Xaa = Any Amino Acid
CCEXWACNXPAXCTGA

SEQ ID NO: 13681 - protein, 17 aa, Artificial Sequence
  Synthetically generated peptide
  VARIANT (1)..(17): Xaa = Any Amino Acid
CCEXWACNXPAXXCTGA

SEQ ID NO: 13682 - protein, 17 aa, Artificial Sequence
  Synthetically generated peptide
  VARIANT (1)..(17): Xaa = Any Amino Acid
CCEXWACNXPAXCXTGA

SEQ ID NO: 13683 - protein, 17 aa, Artificial Sequence
  Synthetically generated peptide
  VARIANT (1)..(17): Xaa = Any Amino Acid
CCEXWACNXPAXCTXGA

SEQ ID NO: 13684 - protein, 17 aa, Artificial Sequence
  Synthetically generated peptide
  VARIANT (1)..(17): Xaa = Any Amino Acid
CCEXWACNXPAXCTGXA

SEQ ID NO: 13685 - protein, 16 aa, Artificial Sequence
  Synthetically generated peptide
  VARIANT (1)..(16): Xaa = Any Amino Acid
CCEXWACNXPACXTGA

SEQ ID NO: 13686 - protein, 17 aa, Artificial Sequence
  Synthetically generated peptide
  VARIANT (1)..(17): Xaa = Any Amino Acid
CCEXWACNXPACXXTGA

SEQ ID NO: 13687 - protein, 17 aa, Artificial Sequence
  Synthetically generated peptide
  VARIANT (1)..(17): Xaa = Any Amino Acid
CCEXWACNXPACXTXGA

SEQ ID NO: 13688 - protein, 17 aa, Artificial Sequence
  Synthetically generated peptide
  VARIANT (1)..(17): Xaa = Any Amino Acid
CCEXWACNXPACXTGXA

SEQ ID NO: 13689 - protein, 16 aa, Artificial Sequence
  Synthetically generated peptide
  VARIANT (1)..(16): Xaa = Any Amino Acid
CCEXWACNXPACTXGA

SEQ ID NO: 13690 - protein, 17 aa, Artificial Sequence
  Synthetically generated peptide
  VARIANT (1)..(17): Xaa = Any Amino Acid
CCEXWACNXPACTXXGA

SEQ ID NO: 13691 - protein, 17 aa, Artificial Sequence
  Synthetically generated peptide
  VARIANT (1)..(17): Xaa = Any Amino Acid
CCEXWACNXPACTXGXA

SEQ ID NO: 13692 - protein, 16 aa, Artificial Sequence
  Synthetically generated peptide
  VARIANT (1)..(16): Xaa = Any Amino Acid
CCEXWACNXPACTGXA

SEQ ID NO: 13693 - protein, 17 aa, Artificial Sequence
  Synthetically generated peptide
  VARIANT (1)..(17): Xaa = Any Amino Acid
CCEXWACNXPACTGXXA

SEQ ID NO: 13694 - protein, 15 aa, Artificial Sequence
  Synthetically generated peptide
  VARIANT (1)..(15): Xaa = Any Amino Acid
CCEXWACNPXACTGA

SEQ ID NO: 13695 - protein, 16 aa, Artificial Sequence
  Synthetically generated peptide
  VARIANT (1)..(16): Xaa = Any Amino Acid
CCEXWACNPXXACTGA

SEQ ID NO: 13696 - protein, 17 aa, Artificial Sequence
  Synthetically generated peptide
  VARIANT (1)..(17): Xaa = Any Amino Acid
CCEXWACNPXXXACTGA

SEQ ID NO: 13697 - protein, 17 aa, Artificial Sequence
  Synthetically generated peptide
  VARIANT (1)..(17): Xaa = Any Amino Acid
CCEXWACNPXXAXCTGA

SEQ ID NO: 13698 - protein, 17 aa, Artificial Sequence
  Synthetically generated peptide
  VARIANT (1)..(17): Xaa = Any Amino Acid
CCEXWACNPXXACXTGA

SEQ ID NO: 13699 - protein, 17 aa, Artificial Sequence
  Synthetically generated peptide
  VARIANT (1)..(17): Xaa = Any Amino Acid
CCEXWACNPXXACTXGA

SEQ ID NO: 13700 - protein, 17 aa, Artificial Sequence
  Synthetically generated peptide
  VARIANT (1)..(17): Xaa = Any Amino Acid
CCEXWACNPXXACTGXA

SEQ ID NO: 13701 - protein, 16 aa, Artificial Sequence
  Synthetically generated peptide
  VARIANT (1)..(16): Xaa = Any Amino Acid
CCEXWACNPXAXCTGA

SEQ ID NO: 13702 - protein, 17 aa, Artificial Sequence
  Synthetically generated peptide
  VARIANT (1)..(17): Xaa = Any Amino Acid
CCEXWACNPXAXXCTGA

SEQ ID NO: 13703 - protein, 17 aa, Artificial Sequence
  Synthetically generated peptide
  VARIANT (1)..(17): Xaa = Any Amino Acid
CCEXWACNPXAXCXTGA

SEQ ID NO: 13704 - protein, 17 aa, Artificial Sequence
  Synthetically generated peptide
  VARIANT (1)..(17): Xaa = Any Amino Acid
CCEXWACNPXAXCTXGA

SEQ ID NO: 13705 - protein, 17 aa, Artificial Sequence
  Synthetically generated peptide
  VARIANT (1)..(17): Xaa = Any Amino Acid
CCEXWACNPXAXCTGXA

SEQ ID NO: 13706 - protein, 16 aa, Artificial Sequence
  Synthetically generated peptide
  VARIANT (1)..(16): Xaa = Any Amino Acid
CCEXWACNPXACXTGA

SEQ ID NO: 13707 - protein, 17 aa, Artificial Sequence
  Synthetically generated peptide
  VARIANT (1)..(17): Xaa = Any Amino Acid
CCEXWACNPXACXXTGA

SEQ ID NO: 13708 - protein, 17 aa, Artificial Sequence
  Synthetically generated peptide
  VARIANT (1)..(17): Xaa = Any Amino Acid
CCEXWACNPXACXTXGA

SEQ ID NO: 13709 - protein, 17 aa, Artificial Sequence
  Synthetically generated peptide
  VARIANT (1)..(17): Xaa = Any Amino Acid
CCEXWACNPXACXTGXA

SEQ ID NO: 13710 - protein, 16 aa, Artificial Sequence
  Synthetically generated peptide
  VARIANT (1)..(16): Xaa = Any Amino Acid
CCEXWACNPXACTXGA

SEQ ID NO: 13711 - protein, 17 aa, Artificial Sequence
  Synthetically generated peptide
  VARIANT (1)..(17): Xaa = Any Amino Acid
CCEXWACNPXACTXXGA

SEQ ID NO: 13712 - protein, 17 aa, Artificial Sequence
  Synthetically generated peptide
  VARIANT (1)..(17): Xaa = Any Amino Acid
CCEXWACNPXACTXGXA

SEQ ID NO: 13713 - protein, 16 aa, Artificial Sequence
  Synthetically generated peptide
  VARIANT (1)..(16): Xaa = Any Amino Acid
CCEXWACNPXACTGXA

SEQ ID NO: 13714 - protein, 17 aa, Artificial Sequence
  Synthetically generated peptide
  VARIANT (1)..(17): Xaa = Any Amino Acid
CCEXWACNPXACTGXXA

SEQ ID NO: 13715 - protein, 15 aa, Artificial Sequence
  Synthetically generated peptide
  VARIANT (1)..(15): Xaa = Any Amino Acid
CCEXWACNPAXCTGA

SEQ ID NO: 13716 - protein, 16 aa, Artificial Sequence
  Synthetically generated peptide
  VARIANT (1)..(16): Xaa = Any Amino Acid
CCEXWACNPAXXCTGA

SEQ ID NO: 13717 - protein, 17 aa, Artificial Sequence
  Synthetically generated peptide
  VARIANT (1)..(17): Xaa = Any Amino Acid
CCEXWACNPAXXXCTGA

SEQ ID NO: 13718 - protein, 17 aa, Artificial Sequence
  Synthetically generated peptide
  VARIANT (1)..(17): Xaa = Any Amino Acid
CCEXWACNPAXXCXTGA

SEQ ID NO: 13719 - protein, 17 aa, Artificial Sequence
  Synthetically generated peptide
  VARIANT (1)..(17): Xaa = Any Amino Acid
CCEXWACNPAXXCTXGA

SEQ ID NO: 13720 - protein, 17 aa, Artificial Sequence
  Synthetically generated peptide
  VARIANT (1)..(17): Xaa = Any Amino Acid
CCEXWACNPAXXCTGXA

SEQ ID NO: 13721 - protein, 16 aa, Artificial Sequence
  Synthetically generated peptide
  VARIANT (1)..(16): Xaa = Any Amino Acid
CCEXWACNPAXCXTGA

SEQ ID NO: 13722 - protein, 17 aa, Artificial Sequence
  Synthetically generated peptide
  VARIANT (1)..(17): Xaa = Any Amino Acid
CCEXWACNPAXCXXTGA

SEQ ID NO: 13723 - protein, 17 aa, Artificial Sequence
  Synthetically generated peptide
  VARIANT (1)..(17): Xaa = Any Amino Acid
CCEXWACNPAXCXTXGA

SEQ ID NO: 13724 - protein, 17 aa, Artificial Sequence
  Synthetically generated peptide
  VARIANT (1)..(17): Xaa = Any Amino Acid
CCEXWACNPAXCXTGXA

SEQ ID NO: 13725 - protein, 16 aa, Artificial Sequence
  Synthetically generated peptide
  VARIANT (1)..(16): Xaa = Any Amino Acid
CCEXWACNPAXCTXGA

SEQ ID NO: 13726 - protein, 17 aa, Artificial Sequence
  Synthetically generated peptide
  VARIANT (1)..(17): Xaa = Any Amino Acid
CCEXWACNPAXCTXXGA

SEQ ID NO: 13727 - protein, 17 aa, Artificial Sequence
  Synthetically generated peptide
  VARIANT (1)..(17): Xaa = Any Amino Acid
CCEXWACNPAXCTXGXA

SEQ ID NO: 13728 - protein, 16 aa, Artificial Sequence
  Synthetically generated peptide
  VARIANT (1)..(16): Xaa = Any Amino Acid
CCEXWACNPAXCTGXA

SEQ ID NO: 13729 - protein, 17 aa, Artificial Sequence
  Synthetically generated peptide
  VARIANT (1)..(17): Xaa = Any Amino Acid
CCEXWACNPAXCTGXXA

SEQ ID NO: 13730 - protein, 15 aa, Artificial Sequence
  Synthetically generated peptide
  VARIANT (1)..(15): Xaa = Any Amino Acid
CCEXWACNPACXTGA

SEQ ID NO: 13731 - protein, 16 aa, Artificial Sequence
  Synthetically generated peptide
  VARIANT (1)..(16): Xaa = Any Amino Acid
CCEXWACNPACXXTGA

SEQ ID NO: 13732 - protein, 17 aa, Artificial Sequence
  Synthetically generated peptide
  VARIANT (1)..(17): Xaa = Any Amino Acid
CCEXWACNPACXXXTGA

SEQ ID NO: 13733 - protein, 17 aa, Artificial Sequence
  Synthetically generated peptide
  VARIANT (1)..(17): Xaa = Any Amino Acid
CCEXWACNPACXXTXGA

SEQ ID NO: 13734 - protein, 17 aa, Artificial Sequence
  Synthetically generated peptide
  VARIANT (1)..(17): Xaa = Any Amino Acid
CCEXWACNPACXXTGXA

SEQ ID NO: 13735 - protein, 16 aa, Artificial Sequence
  Synthetically generated peptide
  VARIANT (1)..(16): Xaa = Any Amino Acid
CCEXWACNPACXTXGA

SEQ ID NO: 13736 - protein, 17 aa, Artificial Sequence
  Synthetically generated peptide
  VARIANT (1)..(17): Xaa = Any Amino Acid
CCEXWACNPACXTXXGA

SEQ ID NO: 13737 - protein, 17 aa, Artificial Sequence
  Synthetically generated peptide
  VARIANT (1)..(17): Xaa = Any Amino Acid
CCEXWACNPACXTXGXA

SEQ ID NO: 13738 - protein, 16 aa, Artificial Sequence
  Synthetically generated peptide
  VARIANT (1)..(16): Xaa = Any Amino Acid
CCEXWACNPACXTGXA

SEQ ID NO: 13739 - protein, 17 aa, Artificial Sequence
  Synthetically generated peptide
  VARIANT (1)..(17): Xaa = Any Amino Acid
CCEXWACNPACXTGXXA

SEQ ID NO: 13740 - protein, 15 aa, Artificial Sequence
  Synthetically generated peptide
  VARIANT (1)..(15): Xaa = Any Amino Acid
CCEXWACNPACTXGA

SEQ ID NO: 13741 - protein, 16 aa, Artificial Sequence
  Synthetically generated peptide
  VARIANT (1)..(16): Xaa = Any Amino Acid
CCEXWACNPACTXXGA

SEQ ID NO: 13742 - protein, 17 aa, Artificial Sequence
  Synthetically generated peptide
  VARIANT (1)..(17): Xaa = Any Amino Acid
CCEXWACNPACTXXXGA

SEQ ID NO: 13743 - protein, 17 aa, Artificial Sequence
  Synthetically generated peptide
  VARIANT (1)..(17): Xaa = Any Amino Acid
CCEXWACNPACTXXGXA

SEQ ID NO: 13744 - protein, 16 aa, Artificial Sequence
  Synthetically generated peptide
  VARIANT (1)..(16): Xaa = Any Amino Acid
CCEXWACNPACTXGXA

SEQ ID NO: 13745 - protein, 17 aa, Artificial Sequence
  Synthetically generated peptide
  VARIANT (1)..(17): Xaa = Any Amino Acid
CCEXWACNPACTXGXXA

SEQ ID NO: 13746 - protein, 15 aa, Artificial Sequence
  Synthetically generated peptide
  VARIANT (1)..(15): Xaa = Any Amino Acid
CCEXWACNPACTGXA

SEQ ID NO: 13747 - protein, 16 aa, Artificial Sequence
  Synthetically generated peptide
  VARIANT (1)..(16): Xaa = Any Amino Acid
CCEXWACNPACTGXXA

SEQ ID NO: 13748 - protein, 17 aa, Artificial Sequence
  Synthetically generated peptide
  VARIANT (1)..(17): Xaa = Any Amino Acid
CCEXWACNPACTGXXXA

SEQ ID NO: 13749 - protein, 14 aa, Artificial Sequence
  Synthetically generated peptide
  VARIANT (1)..(14): Xaa = Any Amino Acid
CCEWXACNPACTGA

SEQ ID NO: 13750 - protein, 15 aa, Artificial Sequence
  Synthetically generated peptide
  VARIANT (1)..(15): Xaa = Any Amino Acid
CCEWXXACNPACTGA

SEQ ID NO: 13751 - protein, 16 aa, Artificial Sequence
  Synthetically generated peptide
  VARIANT (1)..(16): Xaa = Any Amino Acid
CCEWXXXACNPACTGA

SEQ ID NO: 13752 - protein, 17 aa, Artificial Sequence
  Synthetically generated peptide
  VARIANT (1)..(17): Xaa = Any Amino Acid
CCEWXXXXACNPACTGA

SEQ ID NO: 13753 - protein, 17 aa, Artificial Sequence
  Synthetically generated peptide
  VARIANT (1)..(17): Xaa = Any Amino Acid
CCEWXXXACXNPACTGA

SEQ ID NO: 13754 - protein, 17 aa, Artificial Sequence
  Synthetically generated peptide
  VARIANT (1)..(17): Xaa = Any Amino Acid
CCEWXXXACNXPACTGA

SEQ ID NO: 13755 - protein, 17 aa, Artificial Sequence
  Synthetically generated peptide
  VARIANT (1)..(17): Xaa = Any Amino Acid
CCEWXXXACNPXACTGA

SEQ ID NO: 13756 - protein, 17 aa, Artificial Sequence
  Synthetically generated peptide
  VARIANT (1)..(17): Xaa = Any Amino Acid
CCEWXXXACNPAXCTGA

SEQ ID NO: 13757 - protein, 17 aa, Artificial Sequence
  Synthetically generated peptide
  VARIANT (1)..(17): Xaa = Any Amino Acid
CCEWXXXACNPACXTGA

SEQ ID NO: 13758 - protein, 17 aa, Artificial Sequence
  Synthetically generated peptide
  VARIANT (1)..(17): Xaa = Any Amino Acid
CCEWXXXACNPACTXGA

SEQ ID NO: 13759 - protein, 17 aa, Artificial Sequence
  Synthetically generated peptide
  VARIANT (1)..(17): Xaa = Any Amino Acid
CCEWXXXACNPACTGXA

SEQ ID NO: 13760 - protein, 16 aa, Artificial Sequence
  Synthetically generated peptide
  VARIANT (1)..(16): Xaa = Any Amino Acid
CCEWXXACXNPACTGA

SEQ ID NO: 13761 - protein, 17 aa, Artificial Sequence
  Synthetically generated peptide
  VARIANT (1)..(17): Xaa = Any Amino Acid
CCEWXXACXXNPACTGA

SEQ ID NO: 13762 - protein, 17 aa, Artificial Sequence
  Synthetically generated peptide
  VARIANT (1)..(17): Xaa = Any Amino Acid
CCEWXXACXNXPACTGA

SEQ ID NO: 13763 - protein, 17 aa, Artificial Sequence
  Synthetically generated peptide
  VARIANT (1)..(17): Xaa = Any Amino Acid
CCEWXXACXNPXACTGA

SEQ ID NO: 13764 - protein, 17 aa, Artificial Sequence
  Synthetically generated peptide
  VARIANT (1)..(17): Xaa = Any Amino Acid
CCEWXXACXNPAXCTGA

SEQ ID NO: 13765 - protein, 17 aa, Artificial Sequence
  Synthetically generated peptide
  VARIANT (1)..(17): Xaa = Any Amino Acid
CCEWXXACXNPACXTGA

SEQ ID NO: 13766 - protein, 17 aa, Artificial Sequence
  Synthetically generated peptide
  VARIANT (1)..(17): Xaa = Any Amino Acid
CCEWXXACXNPACTXGA

SEQ ID NO: 13767 - protein, 17 aa, Artificial Sequence
  Synthetically generated peptide
  VARIANT (1)..(17): Xaa = Any Amino Acid
CCEWXXACXNPACTGXA

SEQ ID NO: 13768 - protein, 16 aa, Artificial Sequence
  Synthetically generated peptide
  VARIANT (1)..(16): Xaa = Any Amino Acid
CCEWXXACNXPACTGA

SEQ ID NO: 13769 - protein, 17 aa, Artificial Sequence
  Synthetically generated peptide
  VARIANT (1)..(17): Xaa = Any Amino Acid
CCEWXXACNXXPACTGA

SEQ ID NO: 13770 - protein, 17 aa, Artificial Sequence
  Synthetically generated peptide
  VARIANT (1)..(17): Xaa = Any Amino Acid
CCEWXXACNXPXACTGA

SEQ ID NO: 13771 - protein, 17 aa, Artificial Sequence
  Synthetically generated peptide
  VARIANT (1)..(17): Xaa = Any Amino Acid
CCEWXXACNXPAXCTGA

SEQ ID NO: 13772 - protein, 17 aa, Artificial Sequence
  Synthetically generated peptide
  VARIANT (1)..(17): Xaa = Any Amino Acid
CCEWXXACNXPACXTGA

SEQ ID NO: 13773 - protein, 17 aa, Artificial Sequence
  Synthetically generated peptide
  VARIANT (1)..(17): Xaa = Any Amino Acid
CCEWXXACNXPACTXGA

SEQ ID NO: 13774 - protein, 17 aa, Artificial Sequence
  Synthetically generated peptide
  VARIANT (1)..(17): Xaa = Any Amino Acid
CCEWXXACNXPACTGXA

SEQ ID NO: 13775 - protein, 16 aa, Artificial Sequence
  Synthetically generated peptide
  VARIANT (1)..(16): Xaa = Any Amino Acid
CCEWXXACNPXACTGA

SEQ ID NO: 13776 - protein, 17 aa, Artificial Sequence
  Synthetically generated peptide
  VARIANT (1)..(17): Xaa = Any Amino Acid
CCEWXXACNPXXACTGA

SEQ ID NO: 13777 - protein, 17 aa, Artificial Sequence
  Synthetically generated peptide
  VARIANT (1)..(17): Xaa = Any Amino Acid
CCEWXXACNPXAXCTGA

SEQ ID NO: 13778 - protein, 17 aa, Artificial Sequence
  Synthetically generated peptide
  VARIANT (1)..(17): Xaa = Any Amino Acid
CCEWXXACNPXACXTGA

SEQ ID NO: 13779 - protein, 17 aa, Artificial Sequence
  Synthetically generated peptide
  VARIANT (1)..(17): Xaa = Any Amino Acid
CCEWXXACNPXACTXGA

SEQ ID NO: 13780 - protein, 17 aa, Artificial Sequence
  Synthetically generated peptide
  VARIANT (1)..(17): Xaa = Any Amino Acid
CCEWXXACNPXACTGXA

SEQ ID NO: 13781 - protein, 16 aa, Artificial Sequence
  Synthetically generated peptide
  VARIANT (1)..(16): Xaa = Any Amino Acid
CCEWXXACNPAXCTGA

SEQ ID NO: 13782 - protein, 17 aa, Artificial Sequence
  Synthetically generated peptide
  VARIANT (1)..(17): Xaa = Any Amino Acid
CCEWXXACNPAXXCTGA

SEQ ID NO: 13783 - protein, 17 aa, Artificial Sequence
  Synthetically generated peptide
  VARIANT (1)..(17): Xaa = Any Amino Acid
CCEWXXACNPAXCXTGA

SEQ ID NO: 13784 - protein, 17 aa, Artificial Sequence
  Synthetically generated peptide
  VARIANT (1)..(17): Xaa = Any Amino Acid
CCEWXXACNPAXCTXGA

SEQ ID NO: 13785 - protein, 17 aa, Artificial Sequence
  Synthetically generated peptide
  VARIANT (1)..(17): Xaa = Any Amino Acid
CCEWXXACNPAXCTGXA

SEQ ID NO: 13786 - protein, 16 aa, Artificial Sequence
  Synthetically generated peptide
  VARIANT (1)..(16): Xaa = Any Amino Acid
CCEWXXACNPACXTGA

SEQ ID NO: 13787 - protein, 17 aa, Artificial Sequence
  Synthetically generated peptide
  VARIANT (1)..(17): Xaa = Any Amino Acid
CCEWXXACNPACXXTGA

SEQ ID NO: 13788 - protein, 17 aa, Artificial Sequence
  Synthetically generated peptide
  VARIANT (1)..(17): Xaa = Any Amino Acid
CCEWXXACNPACXTXGA

SEQ ID NO: 13789 - protein, 17 aa, Artificial Sequence
  Synthetically generated peptide
  VARIANT (1)..(17): Xaa = Any Amino Acid
CCEWXXACNPACXTGXA

SEQ ID NO: 13790 - protein, 16 aa, Artificial Sequence
  Synthetically generated peptide
  VARIANT (1)..(16): Xaa = Any Amino Acid
CCEWXXACNPACTXGA

SEQ ID NO: 13791 - protein, 17 aa, Artificial Sequence
  Synthetically generated peptide
  VARIANT (1)..(17): Xaa = Any Amino Acid
CCEWXXACNPACTXXGA

SEQ ID NO: 13792 - protein, 17 aa, Artificial Sequence
  Synthetically generated peptide
  VARIANT (1)..(17): Xaa = Any Amino Acid
CCEWXXACNPACTXGXA

SEQ ID NO: 13793 - protein, 16 aa, Artificial Sequence
  Synthetically generated peptide
  VARIANT (1)..(16): Xaa = Any Amino Acid
CCEWXXACNPACTGXA

SEQ ID NO: 13794 - protein, 17 aa, Artificial Sequence
  Synthetically generated peptide
  VARIANT (1)..(17): Xaa = Any Amino Acid
CCEWXXACNPACTGXXA

SEQ ID NO: 13795 - protein, 15 aa, Artificial Sequence
  Synthetically generated peptide
  VARIANT (1)..(15): Xaa = Any Amino Acid
CCEWXACXNPACTGA

SEQ ID NO: 13796 - protein, 16 aa, Artificial Sequence
  Synthetically generated peptide
  VARIANT (1)..(16): Xaa = Any Amino Acid
CCEWXACXXNPACTGA

SEQ ID NO: 13797 - protein, 17 aa, Artificial Sequence
  Synthetically generated peptide
  VARIANT (1)..(17): Xaa = Any Amino Acid
CCEWXACXXXNPACTGA

SEQ ID NO: 13798 - protein, 17 aa, Artificial Sequence
  Synthetically generated peptide
  VARIANT (1)..(17): Xaa = Any Amino Acid
CCEWXACXXNXPACTGA

SEQ ID NO: 13799 - protein, 17 aa, Artificial Sequence
  Synthetically generated peptide
  VARIANT (1)..(17): Xaa = Any Amino Acid
CCEWXACXXNPXACTGA

SEQ ID NO: 13800 - protein, 17 aa, Artificial Sequence
  Synthetically generated peptide
  VARIANT (1)..(17): Xaa = Any Amino Acid
CCEWXACXXNPAXCTGA

SEQ ID NO: 13801 - protein, 17 aa, Artificial Sequence
  Synthetically generated peptide
  VARIANT (1)..(17): Xaa = Any Amino Acid
CCEWXACXXNPACXTGA

SEQ ID NO: 13802 - protein, 17 aa, Artificial Sequence
  Synthetically generated peptide
  VARIANT (1)..(17): Xaa = Any Amino Acid
CCEWXACXXNPACTXGA

SEQ ID NO: 13803 - protein, 17 aa, Artificial Sequence
  Synthetically generated peptide
  VARIANT (1)..(17): Xaa = Any Amino Acid
CCEWXACXXNPACTGXA

SEQ ID NO: 13804 - protein, 16 aa, Artificial Sequence
  Synthetically generated peptide
  VARIANT (1)..(16): Xaa = Any Amino Acid
CCEWXACXNXPACTGA

SEQ ID NO: 13805 - protein, 17 aa, Artificial Sequence
  Synthetically generated peptide
  VARIANT (1)..(17): Xaa = Any Amino Acid
CCEWXACXNXXPACTGA

SEQ ID NO: 13806 - protein, 17 aa, Artificial Sequence
  Synthetically generated peptide
  VARIANT (1)..(17): Xaa = Any Amino Acid
CCEWXACXNXPXACTGA

SEQ ID NO: 13807 - protein, 17 aa, Artificial Sequence
  Synthetically generated peptide
  VARIANT (1)..(17): Xaa = Any Amino Acid
CCEWXACXNXPAXCTGA

SEQ ID NO: 13808 - protein, 17 aa, Artificial Sequence
  Synthetically generated peptide
  VARIANT (1)..(17): Xaa = Any Amino Acid
CCEWXACXNXPACXTGA

SEQ ID NO: 13809 - protein, 17 aa, Artificial Sequence
  Synthetically generated peptide
  VARIANT (1)..(17): Xaa = Any Amino Acid
CCEWXACXNXPACTXGA

SEQ ID NO: 13810 - protein, 17 aa, Artificial Sequence
  Synthetically generated peptide
  VARIANT (1)..(17): Xaa = Any Amino Acid
CCEWXACXNXPACTGXA

SEQ ID NO: 13811 - protein, 16 aa, Artificial Sequence
  Synthetically generated peptide
  VARIANT (1)..(16): Xaa = Any Amino Acid
CCEWXACXNPXACTGA

SEQ ID NO: 13812 - protein, 17 aa, Artificial Sequence
  Synthetically generated peptide
  VARIANT (1)..(17): Xaa = Any Amino Acid
CCEWXACXNPXXACTGA

SEQ ID NO: 13813 - protein, 17 aa, Artificial Sequence
  Synthetically generated peptide
  VARIANT (1)..(17): Xaa = Any Amino Acid
CCEWXACXNPXAXCTGA

SEQ ID NO: 13814 - protein, 17 aa, Artificial Sequence
  Synthetically generated peptide
  VARIANT (1)..(17): Xaa = Any Amino Acid
CCEWXACXNPXACXTGA

SEQ ID NO: 13815 - protein, 17 aa, Artificial Sequence
  Synthetically generated peptide
  VARIANT (1)..(17): Xaa = Any Amino Acid
CCEWXACXNPXACTXGA

SEQ ID NO: 13816 - protein, 17 aa, Artificial Sequence
  Synthetically generated peptide
  VARIANT (1)..(17): Xaa = Any Amino Acid
CCEWXACXNPXACTGXA

SEQ ID NO: 13817 - protein, 16 aa, Artificial Sequence
  Synthetically generated peptide
  VARIANT (1)..(16): Xaa = Any Amino Acid
CCEWXACXNPAXCTGA

SEQ ID NO: 13818 - protein, 17 aa, Artificial Sequence
  Synthetically generated peptide
  VARIANT (1)..(17): Xaa = Any Amino Acid
CCEWXACXNPAXXCTGA

SEQ ID NO: 13819 - protein, 17 aa, Artificial Sequence
  Synthetically generated peptide
  VARIANT (1)..(17): Xaa = Any Amino Acid
CCEWXACXNPAXCXTGA

SEQ ID NO: 13820 - protein, 17 aa, Artificial Sequence
  Synthetically generated peptide
  VARIANT (1)..(17): Xaa = Any Amino Acid
CCEWXACXNPAXCTXGA

SEQ ID NO: 13821 - protein, 17 aa, Artificial Sequence
  Synthetically generated peptide
  VARIANT (1)..(17): Xaa = Any Amino Acid
CCEWXACXNPAXCTGXA

SEQ ID NO: 13822 - protein, 16 aa, Artificial Sequence
  Synthetically generated peptide
  VARIANT (1)..(16): Xaa = Any Amino Acid
CCEWXACXNPACXTGA

SEQ ID NO: 13823 - protein, 17 aa, Artificial Sequence
  Synthetically generated peptide
  VARIANT (1)..(17): Xaa = Any Amino Acid
CCEWXACXNPACXXTGA

SEQ ID NO: 13824 - protein, 17 aa, Artificial Sequence
  Synthetically generated peptide
  VARIANT (1)..(17): Xaa = Any Amino Acid
CCEWXACXNPACXTXGA

SEQ ID NO: 13825 - protein, 17 aa, Artificial Sequence
  Synthetically generated peptide
  VARIANT (1)..(17): Xaa = Any Amino Acid
CCEWXACXNPACXTGXA

SEQ ID NO: 13826 - protein, 16 aa, Artificial Sequence
  Synthetically generated peptide
  VARIANT (1)..(16): Xaa = Any Amino Acid
CCEWXACXNPACTXGA

SEQ ID NO: 13827 - protein, 17 aa, Artificial Sequence
  Synthetically generated peptide
  VARIANT (1)..(17): Xaa = Any Amino Acid
CCEWXACXNPACTXXGA

SEQ ID NO: 13828 - protein, 17 aa, Artificial Sequence
  Synthetically generated peptide
  VARIANT (1)..(17): Xaa = Any Amino Acid
CCEWXACXNPACTXGXA

SEQ ID NO: 13829 - protein, 16 aa, Artificial Sequence
  Synthetically generated peptide
  VARIANT (1)..(16): Xaa = Any Amino Acid
CCEWXACXNPACTGXA

SEQ ID NO: 13830 - protein, 17 aa, Artificial Sequence
  Synthetically generated peptide
  VARIANT (1)..(17): Xaa = Any Amino Acid
CCEWXACXNPACTGXXA

SEQ ID NO: 13831 - protein, 15 aa, Artificial Sequence
  Synthetically generated peptide
  VARIANT (1)..(15): Xaa = Any Amino Acid
CCEWXACNXPACTGA

SEQ ID NO: 13832 - protein, 16 aa, Artificial Sequence
  Synthetically generated peptide
  VARIANT (1)..(16): Xaa = Any Amino Acid
CCEWXACNXXPACTGA

SEQ ID NO: 13833 - protein, 17 aa, Artificial Sequence
  Synthetically generated peptide
  VARIANT (1)..(17): Xaa = Any Amino Acid
CCEWXACNXXXPACTGA

SEQ ID NO: 13834 - protein, 17 aa, Artificial Sequence
  Synthetically generated peptide
  VARIANT (1)..(17): Xaa = Any Amino Acid
CCEWXACNXXPXACTGA

SEQ ID NO: 13835 - protein, 17 aa, Artificial Sequence
  Synthetically generated peptide
  VARIANT (1)..(17): Xaa = Any Amino Acid
CCEWXACNXXPAXCTGA

SEQ ID NO: 13836 - protein, 17 aa, Artificial Sequence
  Synthetically generated peptide
  VARIANT (1)..(17): Xaa = Any Amino Acid
CCEWXACNXXPACXTGA

SEQ ID NO: 13837 - protein, 17 aa, Artificial Sequence
  Synthetically generated peptide
  VARIANT (1)..(17): Xaa = Any Amino Acid
CCEWXACNXXPACTXGA

SEQ ID NO: 13838 - protein, 17 aa, Artificial Sequence
  Synthetically generated peptide
  VARIANT (1)..(17): Xaa = Any Amino Acid
CCEWXACNXXPACTGXA

SEQ ID NO: 13839 - protein, 16 aa, Artificial Sequence
  Synthetically generated peptide
  VARIANT (1)..(16): Xaa = Any Amino Acid
CCEWXACNXPXACTGA

SEQ ID NO: 13840 - protein, 17 aa, Artificial Sequence
  Synthetically generated peptide
  VARIANT (1)..(17): Xaa = Any Amino Acid
CCEWXACNXPXXACTGA

SEQ ID NO: 13841 - protein, 17 aa, Artificial Sequence
  Synthetically generated peptide
  VARIANT (1)..(17): Xaa = Any Amino Acid
CCEWXACNXPXAXCTGA

SEQ ID NO: 13842 - protein, 17 aa, Artificial Sequence
  Synthetically generated peptide
  VARIANT (1)..(17): Xaa = Any Amino Acid
CCEWXACNXPXACXTGA

SEQ ID NO: 13843 - protein, 17 aa, Artificial Sequence
  Synthetically generated peptide
  VARIANT (1)..(17): Xaa = Any Amino Acid
CCEWXACNXPXACTXGA

SEQ ID NO: 13844 - protein, 17 aa, Artificial Sequence
  Synthetically generated peptide
  VARIANT (1)..(17): Xaa = Any Amino Acid
CCEWXACNXPXACTGXA

SEQ ID NO: 13845 - protein, 16 aa, Artificial Sequence
  Synthetically generated peptide
  VARIANT (1)..(16): Xaa = Any Amino Acid
CCEWXACNXPAXCTGA

SEQ ID NO: 13846 - protein, 17 aa, Artificial Sequence
  Synthetically generated peptide
  VARIANT (1)..(17): Xaa = Any Amino Acid
CCEWXACNXPAXXCTGA

SEQ ID NO: 13847 - protein, 17 aa, Artificial Sequence
  Synthetically generated peptide
  VARIANT (1)..(17): Xaa = Any Amino Acid
CCEWXACNXPAXCXTGA

SEQ ID NO: 13848 - protein, 17 aa, Artificial Sequence
  Synthetically generated peptide
  VARIANT (1)..(17): Xaa = Any Amino Acid
CCEWXACNXPAXCTXGA

SEQ ID NO: 13849 - protein, 17 aa, Artificial Sequence
  Synthetically generated peptide
  VARIANT (1)..(17): Xaa = Any Amino Acid
CCEWXACNXPAXCTGXA

SEQ ID NO: 13850 - protein, 16 aa, Artificial Sequence
  Synthetically generated peptide
  VARIANT (1)..(16): Xaa = Any Amino Acid
CCEWXACNXPACXTGA

SEQ ID NO: 13851 - protein, 17 aa, Artificial Sequence
  Synthetically generated peptide
  VARIANT (1)..(17): Xaa = Any Amino Acid
CCEWXACNXPACXXTGA

SEQ ID NO: 13852 - protein, 17 aa, Artificial Sequence
  Synthetically generated peptide
  VARIANT (1)..(17): Xaa = Any Amino Acid
CCEWXACNXPACXTXGA

SEQ ID NO: 13853 - protein, 17 aa, Artificial Sequence
  Synthetically generated peptide
  VARIANT (1)..(17): Xaa = Any Amino Acid
CCEWXACNXPACXTGXA

SEQ ID NO: 13854 - protein, 16 aa, Artificial Sequence
  Synthetically generated peptide
  VARIANT (1)..(16): Xaa = Any Amino Acid
CCEWXACNXPACTXGA

SEQ ID NO: 13855 - protein, 17 aa, Artificial Sequence
  Synthetically generated peptide
  VARIANT (1)..(17): Xaa = Any Amino Acid
CCEWXACNXPACTXXGA

SEQ ID NO: 13856 - protein, 17 aa, Artificial Sequence
  Synthetically generated peptide
  VARIANT (1)..(17): Xaa = Any Amino Acid
CCEWXACNXPACTXGXA

SEQ ID NO: 13857 - protein, 16 aa, Artificial Sequence
  Synthetically generated peptide
  VARIANT (1)..(16): Xaa = Any Amino Acid
CCEWXACNXPACTGXA

SEQ ID NO: 13858 - protein, 17 aa, Artificial Sequence
  Synthetically generated peptide
  VARIANT (1)..(17): Xaa = Any Amino Acid
CCEWXACNXPACTGXXA

SEQ ID NO: 13859 - protein, 15 aa, Artificial Sequence
  Synthetically generated peptide
  VARIANT (1)..(15): Xaa = Any Amino Acid
CCEWXACNPXACTGA

SEQ ID NO: 13860 - protein, 16 aa, Artificial Sequence
  Synthetically generated peptide
  VARIANT (1)..(16): Xaa = Any Amino Acid
CCEWXACNPXXACTGA

SEQ ID NO: 13861 - protein, 17 aa, Artificial Sequence
  Synthetically generated peptide
  VARIANT (1)..(17): Xaa = Any Amino Acid
CCEWXACNPXXXACTGA

SEQ ID NO: 13862 - protein, 17 aa, Artificial Sequence
  Synthetically generated peptide
  VARIANT (1)..(17): Xaa = Any Amino Acid
CCEWXACNPXXAXCTGA

SEQ ID NO: 13863 - protein, 17 aa, Artificial Sequence
  Synthetically generated peptide
  VARIANT (1)..(17): Xaa = Any Amino Acid
CCEWXACNPXXACXTGA

SEQ ID NO: 13864 - protein, 17 aa, Artificial Sequence
  Synthetically generated peptide
  VARIANT (1)..(17): Xaa = Any Amino Acid
CCEWXACNPXXACTXGA

SEQ ID NO: 13865 - protein, 17 aa, Artificial Sequence
  Synthetically generated peptide
  VARIANT (1)..(17): Xaa = Any Amino Acid
CCEWXACNPXXACTGXA

SEQ ID NO: 13866 - protein, 16 aa, Artificial Sequence
  Synthetically generated peptide
  VARIANT (1)..(16): Xaa = Any Amino Acid
CCEWXACNPXAXCTGA

SEQ ID NO: 13867 - protein, 17 aa, Artificial Sequence
  Synthetically generated peptide
  VARIANT (1)..(17): Xaa = Any Amino Acid
CCEWXACNPXAXXCTGA

SEQ ID NO: 13868 - protein, 17 aa, Artificial Sequence
  Synthetically generated peptide
  VARIANT (1)..(17): Xaa = Any Amino Acid
CCEWXACNPXAXCXTGA

SEQ ID NO: 13869 - protein, 17 aa, Artificial Sequence
  Synthetically generated peptide
  VARIANT (1)..(17): Xaa = Any Amino Acid
CCEWXACNPXAXCTXGA

SEQ ID NO: 13870 - protein, 17 aa, Artificial Sequence
  Synthetically generated peptide
  VARIANT (1)..(17): Xaa = Any Amino Acid
CCEWXACNPXAXCTGXA

SEQ ID NO: 13871 - protein, 16 aa, Artificial Sequence
  Synthetically generated peptide
  VARIANT (1)..(16): Xaa = Any Amino Acid
CCEWXACNPXACXTGA

SEQ ID NO: 13872 - protein, 17 aa, Artificial Sequence
  Synthetically generated peptide
  VARIANT (1)..(17): Xaa = Any Amino Acid
CCEWXACNPXACXXTGA

SEQ ID NO: 13873 - protein, 17 aa, Artificial Sequence
  Synthetically generated peptide
  VARIANT (1)..(17): Xaa = Any Amino Acid
CCEWXACNPXACXTXGA

SEQ ID NO: 13874 - protein, 17 aa, Artificial Sequence
  Synthetically generated peptide
  VARIANT (1)..(17): Xaa = Any Amino Acid
CCEWXACNPXACXTGXA

SEQ ID NO: 13875 - protein, 16 aa, Artificial Sequence
  Synthetically generated peptide
  VARIANT (1)..(16): Xaa = Any Amino Acid
CCEWXACNPXACTXGA

SEQ ID NO: 13876 - protein, 17 aa, Artificial Sequence
  Synthetically generated peptide
  VARIANT (1)..(17): Xaa = Any Amino Acid
CCEWXACNPXACTXXGA

SEQ ID NO: 13877 - protein, 17 aa, Artificial Sequence
  Synthetically generated peptide
  VARIANT (1)..(17): Xaa = Any Amino Acid
CCEWXACNPXACTXGXA

SEQ ID NO: 13878 - protein, 16 aa, Artificial Sequence
  Synthetically generated peptide
  VARIANT (1)..(16): Xaa = Any Amino Acid
CCEWXACNPXACTGXA

SEQ ID NO: 13879 - protein, 17 aa, Artificial Sequence
  Synthetically generated peptide
  VARIANT (1)..(17): Xaa = Any Amino Acid
CCEWXACNPXACTGXXA

SEQ ID NO: 13880 - protein, 15 aa, Artificial Sequence
  Synthetically generated peptide
  VARIANT (1)..(15): Xaa = Any Amino Acid
CCEWXACNPAXCTGA

SEQ ID NO: 13881 - protein, 16 aa, Artificial Sequence
  Synthetically generated peptide
  VARIANT (1)..(16): Xaa = Any Amino Acid
CCEWXACNPAXXCTGA

SEQ ID NO: 13882 - protein, 17 aa, Artificial Sequence
  Synthetically generated peptide
  VARIANT (1)..(17): Xaa = Any Amino Acid
CCEWXACNPAXXXCTGA

SEQ ID NO: 13883 - protein, 17 aa, Artificial Sequence
  Synthetically generated peptide
  VARIANT (1)..(17): Xaa = Any Amino Acid
CCEWXACNPAXXCXTGA

SEQ ID NO: 13884 - protein, 17 aa, Artificial Sequence
  Synthetically generated peptide
  VARIANT (1)..(17): Xaa = Any Amino Acid
CCEWXACNPAXXCTXGA

SEQ ID NO: 13885 - protein, 17 aa, Artificial Sequence
  Synthetically generated peptide
  VARIANT (1)..(17): Xaa = Any Amino Acid
CCEWXACNPAXXCTGXA

SEQ ID NO: 13886 - protein, 16 aa, Artificial Sequence
  Synthetically generated peptide
  VARIANT (1)..(16): Xaa = Any Amino Acid
CCEWXACNPAXCXTGA

SEQ ID NO: 13887 - protein, 17 aa, Artificial Sequence
  Synthetically generated peptide
  VARIANT (1)..(17): Xaa = Any Amino Acid
CCEWXACNPAXCXXTGA

SEQ ID NO: 13888 - protein, 17 aa, Artificial Sequence
  Synthetically generated peptide
  VARIANT (1)..(17): Xaa = Any Amino Acid
CCEWXACNPAXCXTXGA

SEQ ID NO: 13889 - protein, 17 aa, Artificial Sequence
  Synthetically generated peptide
  VARIANT (1)..(17): Xaa = Any Amino Acid
CCEWXACNPAXCXTGXA

SEQ ID NO: 13890 - protein, 16 aa, Artificial Sequence
  Synthetically generated peptide
  VARIANT (1)..(16): Xaa = Any Amino Acid
CCEWXACNPAXCTXGA

SEQ ID NO: 13891 - protein, 17 aa, Artificial Sequence
  Synthetically generated peptide
  VARIANT (1)..(17): Xaa = Any Amino Acid
CCEWXACNPAXCTXXGA

SEQ ID NO: 13892 - protein, 17 aa, Artificial Sequence
  Synthetically generated peptide
  VARIANT (1)..(17): Xaa = Any Amino Acid
CCEWXACNPAXCTXGXA

SEQ ID NO: 13893 - protein, 16 aa, Artificial Sequence
  Synthetically generated peptide
  VARIANT (1)..(16): Xaa = Any Amino Acid
CCEWXACNPAXCTGXA

SEQ ID NO: 13894 - protein, 17 aa, Artificial Sequence
  Synthetically generated peptide
  VARIANT (1)..(17): Xaa = Any Amino Acid
CCEWXACNPAXCTGXXA

SEQ ID NO: 13895 - protein, 15 aa, Artificial Sequence
  Synthetically generated peptide
  VARIANT (1)..(15): Xaa = Any Amino Acid
CCEWXACNPACXTGA

SEQ ID NO: 13896 - protein, 16 aa, Artificial Sequence
  Synthetically generated peptide
  VARIANT (1)..(16): Xaa = Any Amino Acid
CCEWXACNPACXXTGA

SEQ ID NO: 13897 - protein, 17 aa, Artificial Sequence
  Synthetically generated peptide
  VARIANT (1)..(17): Xaa = Any Amino Acid
CCEWXACNPACXXXTGA

SEQ ID NO: 13898 - protein, 17 aa, Artificial Sequence
  Synthetically generated peptide
  VARIANT (1)..(17): Xaa = Any Amino Acid
CCEWXACNPACXXTXGA

SEQ ID NO: 13899 - protein, 17 aa, Artificial Sequence
  Synthetically generated peptide
  VARIANT (1)..(17): Xaa = Any Amino Acid
CCEWXACNPACXXTGXA

SEQ ID NO: 13900 - protein, 16 aa, Artificial Sequence
  Synthetically generated peptide
  VARIANT (1)..(16): Xaa = Any Amino Acid
CCEWXACNPACXTXGA

SEQ ID NO: 13901 - protein, 17 aa, Artificial Sequence
  Synthetically generated peptide
  VARIANT (1)..(17): Xaa = Any Amino Acid
CCEWXACNPACXTXXGA

SEQ ID NO: 13902 - protein, 17 aa, Artificial Sequence
  Synthetically generated peptide
  VARIANT (1)..(17): Xaa = Any Amino Acid
CCEWXACNPACXTXGXA

SEQ ID NO: 13903 - protein, 16 aa, Artificial Sequence
  Synthetically generated peptide
  VARIANT (1)..(16): Xaa = Any Amino Acid
CCEWXACNPACXTGXA

SEQ ID NO: 13904 - protein, 17 aa, Artificial Sequence
  Synthetically generated peptide
  VARIANT (1)..(17): Xaa = Any Amino Acid
CCEWXACNPACXTGXXA

SEQ ID NO: 13905 - protein, 15 aa, Artificial Sequence
  Synthetically generated peptide
  VARIANT (1)..(15): Xaa = Any Amino Acid
CCEWXACNPACTXGA

SEQ ID NO: 13906 - protein, 16 aa, Artificial Sequence
  Synthetically generated peptide
  VARIANT (1)..(16): Xaa = Any Amino Acid
CCEWXACNPACTXXGA

SEQ ID NO: 13907 - protein, 17 aa, Artificial Sequence
  Synthetically generated peptide
  VARIANT (1)..(17): Xaa = Any Amino Acid
CCEWXACNPACTXXXGA

SEQ ID NO: 13908 - protein, 17 aa, Artificial Sequence
  Synthetically generated peptide
  VARIANT (1)..(17): Xaa = Any Amino Acid
CCEWXACNPACTXXGXA

SEQ ID NO: 13909 - protein, 16 aa, Artificial Sequence
  Synthetically generated peptide
  VARIANT (1)..(16): Xaa = Any Amino Acid
CCEWXACNPACTXGXA

SEQ ID NO: 13910 - protein, 17 aa, Artificial Sequence
  Synthetically generated peptide
  VARIANT (1)..(17): Xaa = Any Amino Acid
CCEWXACNPACTXGXXA

SEQ ID NO: 13911 - protein, 15 aa, Artificial Sequence
  Synthetically generated peptide
  VARIANT (1)..(15): Xaa = Any Amino Acid
CCEWXACNPACTGXA

SEQ ID NO: 13912 - protein, 16 aa, Artificial Sequence
  Synthetically generated peptide
  VARIANT (1)..(16): Xaa = Any Amino Acid
CCEWXACNPACTGXXA

SEQ ID NO: 13913 - protein, 17 aa, Artificial Sequence
  Synthetically generated peptide
  VARIANT (1)..(17): Xaa = Any Amino Acid
CCEWXACNPACTGXXXA

SEQ ID NO: 13914 - protein, 14 aa, Artificial Sequence
  Synthetically generated peptide
  VARIANT (1)..(14): Xaa = Any Amino Acid
CCEWACXNPACTGA

SEQ ID NO: 13915 - protein, 15 aa, Artificial Sequence
  Synthetically generated peptide
  VARIANT (1)..(15): Xaa = Any Amino Acid
CCEWACXXNPACTGA

SEQ ID NO: 13916 - protein, 16 aa, Artificial Sequence
  Synthetically generated peptide
  VARIANT (1)..(16): Xaa = Any Amino Acid
CCEWACXXXNPACTGA

SEQ ID NO: 13917 - protein, 17 aa, Artificial Sequence
  Synthetically generated peptide
  VARIANT (1)..(17): Xaa = Any Amino Acid
CCEWACXXXXNPACTGA

SEQ ID NO: 13918 - protein, 17 aa, Artificial Sequence
  Synthetically generated peptide
  VARIANT (1)..(17): Xaa = Any Amino Acid
CCEWACXXXNXPACTGA

SEQ ID NO: 13919 - protein, 17 aa, Artificial Sequence
  Synthetically generated peptide
  VARIANT (1)..(17): Xaa = Any Amino Acid
CCEWACXXXNPXACTGA

SEQ ID NO: 13920 - protein, 17 aa, Artificial Sequence
  Synthetically generated peptide
  VARIANT (1)..(17): Xaa = Any Amino Acid
CCEWACXXXNPAXCTGA

SEQ ID NO: 13921 - protein, 17 aa, Artificial Sequence
  Synthetically generated peptide
  VARIANT (1)..(17): Xaa = Any Amino Acid
CCEWACXXXNPACXTGA

SEQ ID NO: 13922 - protein, 17 aa, Artificial Sequence
  Synthetically generated peptide
  VARIANT (1)..(17): Xaa = Any Amino Acid
CCEWACXXXNPACTXGA

SEQ ID NO: 13923 - protein, 17 aa, Artificial Sequence
  Synthetically generated peptide
  VARIANT (1)..(17): Xaa = Any Amino Acid
CCEWACXXXNPACTGXA

SEQ ID NO: 13924 - protein, 16 aa, Artificial Sequence
  Synthetically generated peptide
  VARIANT (1)..(16): Xaa = Any Amino Acid
CCEWACXXNXPACTGA

SEQ ID NO: 13925 - protein, 17 aa, Artificial Sequence
  Synthetically generated peptide
  VARIANT (1)..(17): Xaa = Any Amino Acid
CCEWACXXNXXPACTGA

SEQ ID NO: 13926 - protein, 17 aa, Artificial Sequence
  Synthetically generated peptide
  VARIANT (1)..(17): Xaa = Any Amino Acid
CCEWACXXNXPXACTGA

SEQ ID NO: 13927 - protein, 17 aa, Artificial Sequence
  Synthetically generated peptide
  VARIANT (1)..(17): Xaa = Any Amino Acid
CCEWACXXNXPAXCTGA

SEQ ID NO: 13928 - protein, 17 aa, Artificial Sequence
  Synthetically generated peptide
  VARIANT (1)..(17): Xaa = Any Amino Acid
CCEWACXXNXPACXTGA

SEQ ID NO: 13929 - protein, 17 aa, Artificial Sequence
  Synthetically generated peptide
  VARIANT (1)..(17): Xaa = Any Amino Acid
CCEWACXXNXPACTXGA

SEQ ID NO: 13930 - protein, 17 aa, Artificial Sequence
  Synthetically generated peptide
  VARIANT (1)..(17): Xaa = Any Amino Acid
CCEWACXXNXPACTGXA

SEQ ID NO: 13931 - protein, 16 aa, Artificial Sequence
  Synthetically generated peptide
  VARIANT (1)..(16): Xaa = Any Amino Acid
CCEWACXXNPXACTGA

SEQ ID NO: 13932 - protein, 17 aa, Artificial Sequence
  Synthetically generated peptide
  VARIANT (1)..(17): Xaa = Any Amino Acid
CCEWACXXNPXXACTGA

SEQ ID NO: 13933 - protein, 17 aa, Artificial Sequence
  Synthetically generated peptide
  VARIANT (1)..(17): Xaa = Any Amino Acid
CCEWACXXNPXAXCTGA

SEQ ID NO: 13934 - protein, 17 aa, Artificial Sequence
  Synthetically generated peptide
  VARIANT (1)..(17): Xaa = Any Amino Acid
CCEWACXXNPXACXTGA

SEQ ID NO: 13935 - protein, 17 aa, Artificial Sequence
  Synthetically generated peptide
  VARIANT (1)..(17): Xaa = Any Amino Acid
CCEWACXXNPXACTXGA

SEQ ID NO: 13936 - protein, 17 aa, Artificial Sequence
  Synthetically generated peptide
  VARIANT (1)..(17): Xaa = Any Amino Acid
CCEWACXXNPXACTGXA

SEQ ID NO: 13937 - protein, 16 aa, Artificial Sequence
  Synthetically generated peptide
  VARIANT (1)..(16): Xaa = Any Amino Acid
CCEWACXXNPAXCTGA

SEQ ID NO: 13938 - protein, 17 aa, Artificial Sequence
  Synthetically generated peptide
  VARIANT (1)..(17): Xaa = Any Amino Acid
CCEWACXXNPAXXCTGA

SEQ ID NO: 13939 - protein, 17 aa, Artificial Sequence
  Synthetically generated peptide
  VARIANT (1)..(17): Xaa = Any Amino Acid
CCEWACXXNPAXCXTGA

SEQ ID NO: 13940 - protein, 17 aa, Artificial Sequence
  Synthetically generated peptide
  VARIANT (1)..(17): Xaa = Any Amino Acid
CCEWACXXNPAXCTXGA

SEQ ID NO: 13941 - protein, 17 aa, Artificial Sequence
  Synthetically generated peptide
  VARIANT (1)..(17): Xaa = Any Amino Acid
CCEWACXXNPAXCTGXA

SEQ ID NO: 13942 - protein, 16 aa, Artificial Sequence
  Synthetically generated peptide
  VARIANT (1)..(16): Xaa = Any Amino Acid
CCEWACXXNPACXTGA

SEQ ID NO: 13943 - protein, 17 aa, Artificial Sequence
  Synthetically generated peptide
  VARIANT (1)..(17): Xaa = Any Amino Acid
CCEWACXXNPACXXTGA

SEQ ID NO: 13944 - protein, 17 aa, Artificial Sequence
  Synthetically generated peptide
  VARIANT (1)..(17): Xaa = Any Amino Acid
CCEWACXXNPACXTXGA

SEQ ID NO: 13945 - protein, 17 aa, Artificial Sequence
  Synthetically generated peptide
  VARIANT (1)..(17): Xaa = Any Amino Acid
CCEWACXXNPACXTGXA

SEQ ID NO: 13946 - protein, 16 aa, Artificial Sequence
  Synthetically generated peptide
  VARIANT (1)..(16): Xaa = Any Amino Acid
CCEWACXXNPACTXGA

SEQ ID NO: 13947 - protein, 17 aa, Artificial Sequence
  Synthetically generated peptide
  VARIANT (1)..(17): Xaa = Any Amino Acid
CCEWACXXNPACTXXGA

SEQ ID NO: 13948 - protein, 17 aa, Artificial Sequence
  Synthetically generated peptide
  VARIANT (1)..(17): Xaa = Any Amino Acid
CCEWACXXNPACTXGXA

SEQ ID NO: 13949 - protein, 16 aa, Artificial Sequence
  Synthetically generated peptide
  VARIANT (1)..(16): Xaa = Any Amino Acid
CCEWACXXNPACTGXA

SEQ ID NO: 13950 - protein, 17 aa, Artificial Sequence
  Synthetically generated peptide
  VARIANT (1)..(17): Xaa = Any Amino Acid
CCEWACXXNPACTGXXA

SEQ ID NO: 13951 - protein, 15 aa, Artificial Sequence
  Synthetically generated peptide
  VARIANT (1)..(15): Xaa = Any Amino Acid
CCEWACXNXPACTGA

SEQ ID NO: 13952 - protein, 16 aa, Artificial Sequence
  Synthetically generated peptide
  VARIANT (1)..(16): Xaa = Any Amino Acid
CCEWACXNXXPACTGA

SEQ ID NO: 13953 - protein, 17 aa, Artificial Sequence
  Synthetically generated peptide
  VARIANT (1)..(17): Xaa = Any Amino Acid
CCEWACXNXXXPACTGA

SEQ ID NO: 13954 - protein, 17 aa, Artificial Sequence
  Synthetically generated peptide
  VARIANT (1)..(17): Xaa = Any Amino Acid
CCEWACXNXXPXACTGA

SEQ ID NO: 13955 - protein, 17 aa, Artificial Sequence
  Synthetically generated peptide
  VARIANT (1)..(17): Xaa = Any Amino Acid
CCEWACXNXXPAXCTGA

SEQ ID NO: 13956 - protein, 17 aa, Artificial Sequence
  Synthetically generated peptide
  VARIANT (1)..(17): Xaa = Any Amino Acid
CCEWACXNXXPACXTGA

SEQ ID NO: 13957 - protein, 17 aa, Artificial Sequence
  Synthetically generated peptide
  VARIANT (1)..(17): Xaa = Any Amino Acid
CCEWACXNXXPACTXGA

SEQ ID NO: 13958 - protein, 17 aa, Artificial Sequence
  Synthetically generated peptide
  VARIANT (1)..(17): Xaa = Any Amino Acid
CCEWACXNXXPACTGXA

SEQ ID NO: 13959 - protein, 16 aa, Artificial Sequence
  Synthetically generated peptide
  VARIANT (1)..(16): Xaa = Any Amino Acid
CCEWACXNXPXACTGA

SEQ ID NO: 13960 - protein, 17 aa, Artificial Sequence
  Synthetically generated peptide
  VARIANT (1)..(17): Xaa = Any Amino Acid
CCEWACXNXPXXACTGA

SEQ ID NO: 13961 - protein, 17 aa, Artificial Sequence
  Synthetically generated peptide
  VARIANT (1)..(17): Xaa = Any Amino Acid
CCEWACXNXPXAXCTGA

SEQ ID NO: 13962 - protein, 17 aa, Artificial Sequence
  Synthetically generated peptide
  VARIANT (1)..(17): Xaa = Any Amino Acid
CCEWACXNXPXACXTGA

SEQ ID NO: 13963 - protein, 17 aa, Artificial Sequence
  Synthetically generated peptide
  VARIANT (1)..(17): Xaa = Any Amino Acid
CCEWACXNXPXACTXGA

SEQ ID NO: 13964 - protein, 17 aa, Artificial Sequence
  Synthetically generated peptide
  VARIANT (1)..(17): Xaa = Any Amino Acid
CCEWACXNXPXACTGXA

SEQ ID NO: 13965 - protein, 16 aa, Artificial Sequence
  Synthetically generated peptide
  VARIANT (1)..(16): Xaa = Any Amino Acid
CCEWACXNXPAXCTGA

SEQ ID NO: 13966 - protein, 17 aa, Artificial Sequence
  Synthetically generated peptide
  VARIANT (1)..(17): Xaa = Any Amino Acid
CCEWACXNXPAXXCTGA

SEQ ID NO: 13967 - protein, 17 aa, Artificial Sequence
  Synthetically generated peptide
  VARIANT (1)..(17): Xaa = Any Amino Acid
CCEWACXNXPAXCXTGA

SEQ ID NO: 13968 - protein, 17 aa, Artificial Sequence
  Synthetically generated peptide
  VARIANT (1)..(17): Xaa = Any Amino Acid
CCEWACXNXPAXCTXGA

SEQ ID NO: 13969 - protein, 17 aa, Artificial Sequence
  Synthetically generated peptide
  VARIANT (1)..(17): Xaa = Any Amino Acid
CCEWACXNXPAXCTGXA

SEQ ID NO: 13970 - protein, 16 aa, Artificial Sequence
  Synthetically generated peptide
  VARIANT (1)..(16): Xaa = Any Amino Acid
CCEWACXNXPACXTGA

SEQ ID NO: 13971 - protein, 17 aa, Artificial Sequence
  Synthetically generated peptide
  VARIANT (1)..(17): Xaa = Any Amino Acid
CCEWACXNXPACXXTGA

SEQ ID NO: 13972 - protein, 17 aa, Artificial Sequence
  Synthetically generated peptide
  VARIANT (1)..(17): Xaa = Any Amino Acid
CCEWACXNXPACXTXGA

SEQ ID NO: 13973 - protein, 17 aa, Artificial Sequence
  Synthetically generated peptide
  VARIANT (1)..(17): Xaa = Any Amino Acid
CCEWACXNXPACXTGXA

SEQ ID NO: 13974 - protein, 16 aa, Artificial Sequence
  Synthetically generated peptide
  VARIANT (1)..(16): Xaa = Any Amino Acid
CCEWACXNXPACTXGA

SEQ ID NO: 13975 - protein, 17 aa, Artificial Sequence
  Synthetically generated peptide
  VARIANT (1)..(17): Xaa = Any Amino Acid
CCEWACXNXPACTXXGA

SEQ ID NO: 13976 - protein, 17 aa, Artificial Sequence
  Synthetically generated peptide
  VARIANT (1)..(17): Xaa = Any Amino Acid
CCEWACXNXPACTXGXA

SEQ ID NO: 13977 - protein, 16 aa, Artificial Sequence
  Synthetically generated peptide
  VARIANT (1)..(16): Xaa = Any Amino Acid
CCEWACXNXPACTGXA

SEQ ID NO: 13978 - protein, 17 aa, Artificial Sequence
  Synthetically generated peptide
  VARIANT (1)..(17): Xaa = Any Amino Acid
CCEWACXNXPACTGXXA

SEQ ID NO: 13979 - protein, 15 aa, Artificial Sequence
  Synthetically generated peptide
  VARIANT (1)..(15): Xaa = Any Amino Acid
CCEWACXNPXACTGA

SEQ ID NO: 13980 - protein, 16 aa, Artificial Sequence
  Synthetically generated peptide
  VARIANT (1)..(16): Xaa = Any Amino Acid
CCEWACXNPXXACTGA

SEQ ID NO: 13981 - protein, 17 aa, Artificial Sequence
  Synthetically generated peptide
  VARIANT (1)..(17): Xaa = Any Amino Acid
CCEWACXNPXXXACTGA

SEQ ID NO: 13982 - protein, 17 aa, Artificial Sequence
  Synthetically generated peptide
  VARIANT (1)..(17): Xaa = Any Amino Acid
CCEWACXNPXXAXCTGA

SEQ ID NO: 13983 - protein, 17 aa, Artificial Sequence
  Synthetically generated peptide
  VARIANT (1)..(17): Xaa = Any Amino Acid
CCEWACXNPXXACXTGA

SEQ ID NO: 13984 - protein, 17 aa, Artificial Sequence
  Synthetically generated peptide
  VARIANT (1)..(17): Xaa = Any Amino Acid
CCEWACXNPXXACTXGA

SEQ ID NO: 13985 - protein, 17 aa, Artificial Sequence
  Synthetically generated peptide
  VARIANT (1)..(17): Xaa = Any Amino Acid
CCEWACXNPXXACTGXA

SEQ ID NO: 13986 - protein, 16 aa, Artificial Sequence
  Synthetically generated peptide
  VARIANT (1)..(16): Xaa = Any Amino Acid
CCEWACXNPXAXCTGA

SEQ ID NO: 13987 - protein, 17 aa, Artificial Sequence
  Synthetically generated peptide
  VARIANT (1)..(17): Xaa = Any Amino Acid
CCEWACXNPXAXXCTGA

SEQ ID NO: 13988 - protein, 17 aa, Artificial Sequence
  Synthetically generated peptide
  VARIANT (1)..(17): Xaa = Any Amino Acid
CCEWACXNPXAXCXTGA

SEQ ID NO: 13989 - protein, 17 aa, Artificial Sequence
  Synthetically generated peptide
  VARIANT (1)..(17): Xaa = Any Amino Acid
CCEWACXNPXAXCTXGA

SEQ ID NO: 13990 - protein, 17 aa, Artificial Sequence
  Synthetically generated peptide
  VARIANT (1)..(17): Xaa = Any Amino Acid
CCEWACXNPXAXCTGXA

SEQ ID NO: 13991 - protein, 16 aa, Artificial Sequence
  Synthetically generated peptide
  VARIANT (1)..(16): Xaa = Any Amino Acid
CCEWACXNPXACXTGA

SEQ ID NO: 13992 - protein, 17 aa, Artificial Sequence
  Synthetically generated peptide
  VARIANT (1)..(17): Xaa = Any Amino Acid
CCEWACXNPXACXXTGA

SEQ ID NO: 13993 - protein, 17 aa, Artificial Sequence
  Synthetically generated peptide
  VARIANT (1)..(17): Xaa = Any Amino Acid
CCEWACXNPXACXTXGA

SEQ ID NO: 13994 - protein, 17 aa, Artificial Sequence
  Synthetically generated peptide
  VARIANT (1)..(17): Xaa = Any Amino Acid
CCEWACXNPXACXTGXA

SEQ ID NO: 13995 - protein, 16 aa, Artificial Sequence
  Synthetically generated peptide
  VARIANT (1)..(16): Xaa = Any Amino Acid
CCEWACXNPXACTXGA

SEQ ID NO: 13996 - protein, 17 aa, Artificial Sequence
  Synthetically generated peptide
  VARIANT (1)..(17): Xaa = Any Amino Acid
CCEWACXNPXACTXXGA

SEQ ID NO: 13997 - protein, 17 aa, Artificial Sequence
  Synthetically generated peptide
  VARIANT (1)..(17): Xaa = Any Amino Acid
CCEWACXNPXACTXGXA

SEQ ID NO: 13998 - protein, 16 aa, Artificial Sequence
  Synthetically generated peptide
  VARIANT (1)..(16): Xaa = Any Amino Acid
CCEWACXNPXACTGXA

SEQ ID NO: 13999 - protein, 17 aa, Artificial Sequence
  Synthetically generated peptide
  VARIANT (1)..(17): Xaa = Any Amino Acid
CCEWACXNPXACTGXXA

SEQ ID NO: 14000 - protein, 15 aa, Artificial Sequence
  Synthetically generated peptide
  VARIANT (1)..(15): Xaa = Any Amino Acid
CCEWACXNPAXCTGA

SEQ ID NO: 14001 - protein, 16 aa, Artificial Sequence
  Synthetically generated peptide
  VARIANT (1)..(16): Xaa = Any Amino Acid
CCEWACXNPAXXCTGA

SEQ ID NO: 14002 - protein, 17 aa, Artificial Sequence
  Synthetically generated peptide
  VARIANT (1)..(17): Xaa = Any Amino Acid
CCEWACXNPAXXXCTGA

SEQ ID NO: 14003 - protein, 17 aa, Artificial Sequence
  Synthetically generated peptide
  VARIANT (1)..(17): Xaa = Any Amino Acid
CCEWACXNPAXXCXTGA

SEQ ID NO: 14004 - protein, 17 aa, Artificial Sequence
  Synthetically generated peptide
  VARIANT (1)..(17): Xaa = Any Amino Acid
CCEWACXNPAXXCTXGA

SEQ ID NO: 14005 - protein, 17 aa, Artificial Sequence
  Synthetically generated peptide
  VARIANT (1)..(17): Xaa = Any Amino Acid
CCEWACXNPAXXCTGXA

SEQ ID NO: 14006 - protein, 16 aa, Artificial Sequence
  Synthetically generated peptide
  VARIANT (1)..(16): Xaa = Any Amino Acid
CCEWACXNPAXCXTGA

SEQ ID NO: 14007 - protein, 17 aa, Artificial Sequence
  Synthetically generated peptide
  VARIANT (1)..(17): Xaa = Any Amino Acid
CCEWACXNPAXCXXTGA

SEQ ID NO: 14008 - protein, 17 aa, Artificial Sequence
  Synthetically generated peptide
  VARIANT (1)..(17): Xaa = Any Amino Acid
CCEWACXNPAXCXTXGA

SEQ ID NO: 14009 - protein, 17 aa, Artificial Sequence
  Synthetically generated peptide
  VARIANT (1)..(17): Xaa = Any Amino Acid
CCEWACXNPAXCXTGXA

SEQ ID NO: 14010 - protein, 16 aa, Artificial Sequence
  Synthetically generated peptide
  VARIANT (1)..(16): Xaa = Any Amino Acid
CCEWACXNPAXCTXGA

SEQ ID NO: 14011 - protein, 17 aa, Artificial Sequence
  Synthetically generated peptide
  VARIANT (1)..(17): Xaa = Any Amino Acid
CCEWACXNPAXCTXXGA

SEQ ID NO: 14012 - protein, 17 aa, Artificial Sequence
  Synthetically generated peptide
  VARIANT (1)..(17): Xaa = Any Amino Acid
CCEWACXNPAXCTXGXA

SEQ ID NO: 14013 - protein, 16 aa, Artificial Sequence
  Synthetically generated peptide
  VARIANT (1)..(16): Xaa = Any Amino Acid
CCEWACXNPAXCTGXA

SEQ ID NO: 14014 - protein, 17 aa, Artificial Sequence
  Synthetically generated peptide
  VARIANT (1)..(17): Xaa = Any Amino Acid
CCEWACXNPAXCTGXXA

SEQ ID NO: 14015 - protein, 15 aa, Artificial Sequence
  Synthetically generated peptide
  VARIANT (1)..(15): Xaa = Any Amino Acid
CCEWACXNPACXTGA

SEQ ID NO: 14016 - protein, 16 aa, Artificial Sequence
  Synthetically generated peptide
  VARIANT (1)..(16): Xaa = Any Amino Acid
CCEWACXNPACXXTGA

SEQ ID NO: 14017 - protein, 17 aa, Artificial Sequence
  Synthetically generated peptide
  VARIANT (1)..(17): Xaa = Any Amino Acid
CCEWACXNPACXXXTGA

SEQ ID NO: 14018 - protein, 17 aa, Artificial Sequence
  Synthetically generated peptide
  VARIANT (1)..(17): Xaa = Any Amino Acid
CCEWACXNPACXXTXGA

SEQ ID NO: 14019 - protein, 17 aa, Artificial Sequence
  Synthetically generated peptide
  VARIANT (1)..(17): Xaa = Any Amino Acid
CCEWACXNPACXXTGXA

SEQ ID NO: 14020 - protein, 16 aa, Artificial Sequence
  Synthetically generated peptide
  VARIANT (1)..(16): Xaa = Any Amino Acid
CCEWACXNPACXTXGA

SEQ ID NO: 14021 - protein, 17 aa, Artificial Sequence
  Synthetically generated peptide
  VARIANT (1)..(17): Xaa = Any Amino Acid
CCEWACXNPACXTXXGA

SEQ ID NO: 14022 - protein, 17 aa, Artificial Sequence
  Synthetically generated peptide
  VARIANT (1)..(17): Xaa = Any Amino Acid
CCEWACXNPACXTXGXA

SEQ ID NO: 14023 - protein, 16 aa, Artificial Sequence
  Synthetically generated peptide
  VARIANT (1)..(16): Xaa = Any Amino Acid
CCEWACXNPACXTGXA

SEQ ID NO: 14024 - protein, 17 aa, Artificial Sequence
  Synthetically generated peptide
  VARIANT (1)..(17): Xaa = Any Amino Acid
CCEWACXNPACXTGXXA

SEQ ID NO: 14025 - protein, 15 aa, Artificial Sequence
  Synthetically generated peptide
  VARIANT (1)..(15): Xaa = Any Amino Acid
CCEWACXNPACTXGA

SEQ ID NO: 14026 - protein, 16 aa, Artificial Sequence
  Synthetically generated peptide
  VARIANT (1)..(16): Xaa = Any Amino Acid
CCEWACXNPACTXXGA

SEQ ID NO: 14027 - protein, 17 aa, Artificial Sequence
  Synthetically generated peptide
  VARIANT (1)..(17): Xaa = Any Amino Acid
CCEWACXNPACTXXXGA

SEQ ID NO: 14028 - protein, 17 aa, Artificial Sequence
  Synthetically generated peptide
  VARIANT (1)..(17): Xaa = Any Amino Acid
CCEWACXNPACTXXGXA

SEQ ID NO: 14029 - protein, 16 aa, Artificial Sequence
  Synthetically generated peptide
  VARIANT (1)..(16): Xaa = Any Amino Acid
CCEWACXNPACTXGXA

SEQ ID NO: 14030 - protein, 17 aa, Artificial Sequence
  Synthetically generated peptide
  VARIANT (1)..(17): Xaa = Any Amino Acid
CCEWACXNPACTXGXXA

SEQ ID NO: 14031 - protein, 15 aa, Artificial Sequence
  Synthetically generated peptide
  VARIANT (1)..(15): Xaa = Any Amino Acid
CCEWACXNPACTGXA

SEQ ID NO: 14032 - protein, 16 aa, Artificial Sequence
  Synthetically generated peptide
  VARIANT (1)..(16): Xaa = Any Amino Acid
CCEWACXNPACTGXXA

SEQ ID NO: 14033 - protein, 17 aa, Artificial Sequence
  Synthetically generated peptide
  VARIANT (1)..(17): Xaa = Any Amino Acid
CCEWACXNPACTGXXXA

SEQ ID NO: 14034 - protein, 14 aa, Artificial Sequence
  Synthetically generated peptide
  VARIANT (1)..(14): Xaa = Any Amino Acid
CCEWACNXPACTGA

SEQ ID NO: 14035 - protein, 15 aa, Artificial Sequence
  Synthetically generated peptide
  VARIANT (1)..(15): Xaa = Any Amino Acid
CCEWACNXXPACTGA

SEQ ID NO: 14036 - protein, 16 aa, Artificial Sequence
  Synthetically generated peptide
  VARIANT (1)..(16): Xaa = Any Amino Acid
CCEWACNXXXPACTGA

SEQ ID NO: 14037 - protein, 17 aa, Artificial Sequence
  Synthetically generated peptide
  VARIANT (1)..(17): Xaa = Any Amino Acid
CCEWACNXXXXPACTGA

SEQ ID NO: 14038 - protein, 17 aa, Artificial Sequence
  Synthetically generated peptide
  VARIANT (1)..(17): Xaa = Any Amino Acid
CCEWACNXXXPXACTGA

SEQ ID NO: 14039 - protein, 17 aa, Artificial Sequence
  Synthetically generated peptide
  VARIANT (1)..(17): Xaa = Any Amino Acid
CCEWACNXXXPAXCTGA

SEQ ID NO: 14040 - protein, 17 aa, Artificial Sequence
  Synthetically generated peptide
  VARIANT (1)..(17): Xaa = Any Amino Acid
CCEWACNXXXPACXTGA

SEQ ID NO: 14041 - protein, 17 aa, Artificial Sequence
  Synthetically generated peptide
  VARIANT (1)..(17): Xaa = Any Amino Acid
CCEWACNXXXPACTXGA

SEQ ID NO: 14042 - protein, 17 aa, Artificial Sequence
  Synthetically generated peptide
  VARIANT (1)..(17): Xaa = Any Amino Acid
CCEWACNXXXPACTGXA

SEQ ID NO: 14043 - protein, 16 aa, Artificial Sequence
  Synthetically generated peptide
  VARIANT (1)..(16): Xaa = Any Amino Acid
CCEWACNXXPXACTGA

SEQ ID NO: 14044 - protein, 17 aa, Artificial Sequence
  Synthetically generated peptide
  VARIANT (1)..(17): Xaa = Any Amino Acid
CCEWACNXXPXXACTGA

SEQ ID NO: 14045 - protein, 17 aa, Artificial Sequence
  Synthetically generated peptide
  VARIANT (1)..(17): Xaa = Any Amino Acid
CCEWACNXXPXAXCTGA

SEQ ID NO: 14046 - protein, 17 aa, Artificial Sequence
  Synthetically generated peptide
  VARIANT (1)..(17): Xaa = Any Amino Acid
CCEWACNXXPXACXTGA

SEQ ID NO: 14047 - protein, 17 aa, Artificial Sequence
  Synthetically generated peptide
  VARIANT (1)..(17): Xaa = Any Amino Acid
CCEWACNXXPXACTXGA

SEQ ID NO: 14048 - protein, 17 aa, Artificial Sequence
  Synthetically generated peptide
  VARIANT (1)..(17): Xaa = Any Amino Acid
CCEWACNXXPXACTGXA

SEQ ID NO: 14049 - protein, 16 aa, Artificial Sequence
  Synthetically generated peptide
  VARIANT (1)..(16): Xaa = Any Amino Acid
CCEWACNXXPAXCTGA

SEQ ID NO: 14050 - protein, 17 aa, Artificial Sequence
  Synthetically generated peptide
  VARIANT (1)..(17): Xaa = Any Amino Acid
CCEWACNXXPAXXCTGA

SEQ ID NO: 14051 - protein, 17 aa, Artificial Sequence
  Synthetically generated peptide
  VARIANT (1)..(17): Xaa = Any Amino Acid
CCEWACNXXPAXCXTGA

SEQ ID NO: 14052 - protein, 17 aa, Artificial Sequence
  Synthetically generated peptide
  VARIANT (1)..(17): Xaa = Any Amino Acid
CCEWACNXXPAXCTXGA

SEQ ID NO: 14053 - protein, 17 aa, Artificial Sequence
  Synthetically generated peptide
  VARIANT (1)..(17): Xaa = Any Amino Acid
CCEWACNXXPAXCTGXA

SEQ ID NO: 14054 - protein, 16 aa, Artificial Sequence
  Synthetically generated peptide
  VARIANT (1)..(16): Xaa = Any Amino Acid
CCEWACNXXPACXTGA

SEQ ID NO: 14055 - protein, 17 aa, Artificial Sequence
  Synthetically generated peptide
  VARIANT (1)..(17): Xaa = Any Amino Acid
CCEWACNXXPACXXTGA

SEQ ID NO: 14056 - protein, 17 aa, Artificial Sequence
  Synthetically generated peptide
  VARIANT (1)..(17): Xaa = Any Amino Acid
CCEWACNXXPACXTXGA

SEQ ID NO: 14057 - protein, 17 aa, Artificial Sequence
  Synthetically generated peptide
  VARIANT (1)..(17): Xaa = Any Amino Acid
CCEWACNXXPACXTGXA

SEQ ID NO: 14058 - protein, 16 aa, Artificial Sequence
  Synthetically generated peptide
  VARIANT (1)..(16): Xaa = Any Amino Acid
CCEWACNXXPACTXGA

SEQ ID NO: 14059 - protein, 17 aa, Artificial Sequence
  Synthetically generated peptide
  VARIANT (1)..(17): Xaa = Any Amino Acid
CCEWACNXXPACTXXGA

SEQ ID NO: 14060 - protein, 17 aa, Artificial Sequence
  Synthetically generated peptide
  VARIANT (1)..(17): Xaa = Any Amino Acid
CCEWACNXXPACTXGXA

SEQ ID NO: 14061 - protein, 16 aa, Artificial Sequence
  Synthetically generated peptide
  VARIANT (1)..(16): Xaa = Any Amino Acid
CCEWACNXXPACTGXA

SEQ ID NO: 14062 - protein, 17 aa, Artificial Sequence
  Synthetically generated peptide
  VARIANT (1)..(17): Xaa = Any Amino Acid
CCEWACNXXPACTGXXA

SEQ ID NO: 14063 - protein, 15 aa, Artificial Sequence
  Synthetically generated peptide
  VARIANT (1)..(15): Xaa = Any Amino Acid
CCEWACNXPXACTGA

SEQ ID NO: 14064 - protein, 16 aa, Artificial Sequence
  Synthetically generated peptide
  VARIANT (1)..(16): Xaa = Any Amino Acid
CCEWACNXPXXACTGA

SEQ ID NO: 14065 - protein, 17 aa, Artificial Sequence
  Synthetically generated peptide
  VARIANT (1)..(17): Xaa = Any Amino Acid
CCEWACNXPXXXACTGA

SEQ ID NO: 14066 - protein, 17 aa, Artificial Sequence
  Synthetically generated peptide
  VARIANT (1)..(17): Xaa = Any Amino Acid
CCEWACNXPXXAXCTGA

SEQ ID NO: 14067 - protein, 17 aa, Artificial Sequence
  Synthetically generated peptide
  VARIANT (1)..(17): Xaa = Any Amino Acid
CCEWACNXPXXACXTGA

SEQ ID NO: 14068 - protein, 17 aa, Artificial Sequence
  Synthetically generated peptide
  VARIANT (1)..(17): Xaa = Any Amino Acid
CCEWACNXPXXACTXGA

SEQ ID NO: 14069 - protein, 17 aa, Artificial Sequence
  Synthetically generated peptide
  VARIANT (1)..(17): Xaa = Any Amino Acid
CCEWACNXPXXACTGXA

SEQ ID NO: 14070 - protein, 16 aa, Artificial Sequence
  Synthetically generated peptide
  VARIANT (1)..(16): Xaa = Any Amino Acid
CCEWACNXPXAXCTGA

SEQ ID NO: 14071 - protein, 17 aa, Artificial Sequence
  Synthetically generated peptide
  VARIANT (1)..(17): Xaa = Any Amino Acid
CCEWACNXPXAXXCTGA

SEQ ID NO: 14072 - protein, 17 aa, Artificial Sequence
  Synthetically generated peptide
  VARIANT (1)..(17): Xaa = Any Amino Acid
CCEWACNXPXAXCXTGA

SEQ ID NO: 14073 - protein, 17 aa, Artificial Sequence
  Synthetically generated peptide
  VARIANT (1)..(17): Xaa = Any Amino Acid
CCEWACNXPXAXCTXGA

SEQ ID NO: 14074 - protein, 17 aa, Artificial Sequence
  Synthetically generated peptide
  VARIANT (1)..(17): Xaa = Any Amino Acid
CCEWACNXPXAXCTGXA

SEQ ID NO: 14075 - protein, 16 aa, Artificial Sequence
  Synthetically generated peptide
  VARIANT (1)..(16): Xaa = Any Amino Acid
CCEWACNXPXACXTGA

SEQ ID NO: 14076 - protein, 17 aa, Artificial Sequence
  Synthetically generated peptide
  VARIANT (1)..(17): Xaa = Any Amino Acid
CCEWACNXPXACXXTGA

SEQ ID NO: 14077 - protein, 17 aa, Artificial Sequence
  Synthetically generated peptide
  VARIANT (1)..(17): Xaa = Any Amino Acid
CCEWACNXPXACXTXGA

SEQ ID NO: 14078 - protein, 17 aa, Artificial Sequence
  Synthetically generated peptide
  VARIANT (1)..(17): Xaa = Any Amino Acid
CCEWACNXPXACXTGXA

SEQ ID NO: 14079 - protein, 16 aa, Artificial Sequence
  Synthetically generated peptide
  VARIANT (1)..(16): Xaa = Any Amino Acid
CCEWACNXPXACTXGA

SEQ ID NO: 14080 - protein, 17 aa, Artificial Sequence
  Synthetically generated peptide
  VARIANT (1)..(17): Xaa = Any Amino Acid
CCEWACNXPXACTXXGA

SEQ ID NO: 14081 - protein, 17 aa, Artificial Sequence
  Synthetically generated peptide
  VARIANT (1)..(17): Xaa = Any Amino Acid
CCEWACNXPXACTXGXA

SEQ ID NO: 14082 - protein, 16 aa, Artificial Sequence
  Synthetically generated peptide
  VARIANT (1)..(16): Xaa = Any Amino Acid
CCEWACNXPXACTGXA

SEQ ID NO: 14083 - protein, 17 aa, Artificial Sequence
  Synthetically generated peptide
  VARIANT (1)..(17): Xaa = Any Amino Acid
CCEWACNXPXACTGXXA

SEQ ID NO: 14084 - protein, 15 aa, Artificial Sequence
  Synthetically generated peptide
  VARIANT (1)..(15): Xaa = Any Amino Acid
CCEWACNXPAXCTGA

SEQ ID NO: 14085 - protein, 16 aa, Artificial Sequence
  Synthetically generated peptide
  VARIANT (1)..(16): Xaa = Any Amino Acid
CCEWACNXPAXXCTGA

SEQ ID NO: 14086 - protein, 17 aa, Artificial Sequence
  Synthetically generated peptide
  VARIANT (1)..(17): Xaa = Any Amino Acid
CCEWACNXPAXXXCTGA

SEQ ID NO: 14087 - protein, 17 aa, Artificial Sequence
  Synthetically generated peptide
  VARIANT (1)..(17): Xaa = Any Amino Acid
CCEWACNXPAXXCXTGA

SEQ ID NO: 14088 - protein, 17 aa, Artificial Sequence
  Synthetically generated peptide
  VARIANT (1)..(17): Xaa = Any Amino Acid
CCEWACNXPAXXCTXGA

SEQ ID NO: 14089 - protein, 17 aa, Artificial Sequence
  Synthetically generated peptide
  VARIANT (1)..(17): Xaa = Any Amino Acid
CCEWACNXPAXXCTGXA

SEQ ID NO: 14090 - protein, 16 aa, Artificial Sequence
  Synthetically generated peptide
  VARIANT (1)..(16): Xaa = Any Amino Acid
CCEWACNXPAXCXTGA

SEQ ID NO: 14091 - protein, 17 aa, Artificial Sequence
  Synthetically generated peptide
  VARIANT (1)..(17): Xaa = Any Amino Acid
CCEWACNXPAXCXXTGA

SEQ ID NO: 14092 - protein, 17 aa, Artificial Sequence
  Synthetically generated peptide
  VARIANT (1)..(17): Xaa = Any Amino Acid
CCEWACNXPAXCXTXGA

SEQ ID NO: 14093 - protein, 17 aa, Artificial Sequence
  Synthetically generated peptide
  VARIANT (1)..(17): Xaa = Any Amino Acid
CCEWACNXPAXCXTGXA

SEQ ID NO: 14094 - protein, 16 aa, Artificial Sequence
  Synthetically generated peptide
  VARIANT (1)..(16): Xaa = Any Amino Acid
CCEWACNXPAXCTXGA

SEQ ID NO: 14095 - protein, 17 aa, Artificial Sequence
  Synthetically generated peptide
  VARIANT (1)..(17): Xaa = Any Amino Acid
CCEWACNXPAXCTXXGA

SEQ ID NO: 14096 - protein, 17 aa, Artificial Sequence
  Synthetically generated peptide
  VARIANT (1)..(17): Xaa = Any Amino Acid
CCEWACNXPAXCTXGXA

SEQ ID NO: 14097 - protein, 16 aa, Artificial Sequence
  Synthetically generated peptide
  VARIANT (1)..(16): Xaa = Any Amino Acid
CCEWACNXPAXCTGXA

SEQ ID NO: 14098 - protein, 17 aa, Artificial Sequence
  Synthetically generated peptide
  VARIANT (1)..(17): Xaa = Any Amino Acid
CCEWACNXPAXCTGXXA

SEQ ID NO: 14099 - protein, 15 aa, Artificial Sequence
  Synthetically generated peptide
  VARIANT (1)..(15): Xaa = Any Amino Acid
CCEWACNXPACXTGA

SEQ ID NO: 14100 - protein, 16 aa, Artificial Sequence
  Synthetically generated peptide
  VARIANT (1)..(16): Xaa = Any Amino Acid
CCEWACNXPACXXTGA

SEQ ID NO: 14101 - protein, 17 aa, Artificial Sequence
  Synthetically generated peptide
  VARIANT (1)..(17): Xaa = Any Amino Acid
CCEWACNXPACXXXTGA

SEQ ID NO: 14102 - protein, 17 aa, Artificial Sequence
  Synthetically generated peptide
  VARIANT (1)..(17): Xaa = Any Amino Acid
CCEWACNXPACXXTXGA

SEQ ID NO: 14103 - protein, 17 aa, Artificial Sequence
  Synthetically generated peptide
  VARIANT (1)..(17): Xaa = Any Amino Acid
CCEWACNXPACXXTGXA

SEQ ID NO: 14104 - protein, 16 aa, Artificial Sequence
  Synthetically generated peptide
  VARIANT (1)..(16): Xaa = Any Amino Acid
CCEWACNXPACXTXGA

SEQ ID NO: 14105 - protein, 17 aa, Artificial Sequence
  Synthetically generated peptide
  VARIANT (1)..(17): Xaa = Any Amino Acid
CCEWACNXPACXTXXGA

SEQ ID NO: 14106 - protein, 17 aa, Artificial Sequence
  Synthetically generated peptide
  VARIANT (1)..(17): Xaa = Any Amino Acid
CCEWACNXPACXTXGXA

SEQ ID NO: 14107 - protein, 16 aa, Artificial Sequence
  Synthetically generated peptide
  VARIANT (1)..(16): Xaa = Any Amino Acid
CCEWACNXPACXTGXA

SEQ ID NO: 14108 - protein, 17 aa, Artificial Sequence
  Synthetically generated peptide
  VARIANT (1)..(17): Xaa = Any Amino Acid
CCEWACNXPACXTGXXA

SEQ ID NO: 14109 - protein, 15 aa, Artificial Sequence
  Synthetically generated peptide
  VARIANT (1)..(15): Xaa = Any Amino Acid
CCEWACNXPACTXGA

SEQ ID NO: 14110 - protein, 16 aa, Artificial Sequence
  Synthetically generated peptide
  VARIANT (1)..(16): Xaa = Any Amino Acid
CCEWACNXPACTXXGA

SEQ ID NO: 14111 - protein, 17 aa, Artificial Sequence
  Synthetically generated peptide
  VARIANT (1)..(17): Xaa = Any Amino Acid
CCEWACNXPACTXXXGA

SEQ ID NO: 14112 - protein, 17 aa, Artificial Sequence
  Synthetically generated peptide
  VARIANT (1)..(17): Xaa = Any Amino Acid
CCEWACNXPACTXXGXA

SEQ ID NO: 14113 - protein, 16 aa, Artificial Sequence
  Synthetically generated peptide
  VARIANT (1)..(16): Xaa = Any Amino Acid
CCEWACNXPACTXGXA

SEQ ID NO: 14114 - protein, 17 aa, Artificial Sequence
  Synthetically generated peptide
  VARIANT (1)..(17): Xaa = Any Amino Acid
CCEWACNXPACTXGXXA

SEQ ID NO: 14115 - protein, 15 aa, Artificial Sequence
  Synthetically generated peptide
  VARIANT (1)..(15): Xaa = Any Amino Acid
CCEWACNXPACTGXA

SEQ ID NO: 14116 - protein, 16 aa, Artificial Sequence
  Synthetically generated peptide
  VARIANT (1)..(16): Xaa = Any Amino Acid
CCEWACNXPACTGXXA

SEQ ID NO: 14117 - protein, 17 aa, Artificial Sequence
  Synthetically generated peptide
  VARIANT (1)..(17): Xaa = Any Amino Acid
CCEWACNXPACTGXXXA

SEQ ID NO: 14118 - protein, 14 aa, Artificial Sequence
  Synthetically generated peptide
  VARIANT (1)..(14): Xaa = Any Amino Acid
CCEWACNPXACTGA

SEQ ID NO: 14119 - protein, 15 aa, Artificial Sequence
  Synthetically generated peptide
  VARIANT (1)..(15): Xaa = Any Amino Acid
CCEWACNPXXACTGA

SEQ ID NO: 14120 - protein, 16 aa, Artificial Sequence
  Synthetically generated peptide
  VARIANT (1)..(16): Xaa = Any Amino Acid
CCEWACNPXXXACTGA

SEQ ID NO: 14121 - protein, 17 aa, Artificial Sequence
  Synthetically generated peptide
  VARIANT (1)..(17): Xaa = Any Amino Acid
CCEWACNPXXXXACTGA

SEQ ID NO: 14122 - protein, 17 aa, Artificial Sequence
  Synthetically generated peptide
  VARIANT (1)..(17): Xaa = Any Amino Acid
CCEWACNPXXXAXCTGA

SEQ ID NO: 14123 - protein, 17 aa, Artificial Sequence
  Synthetically generated peptide
  VARIANT (1)..(17): Xaa = Any Amino Acid
CCEWACNPXXXACXTGA

SEQ ID NO: 14124 - protein, 17 aa, Artificial Sequence
  Synthetically generated peptide
  VARIANT (1)..(17): Xaa = Any Amino Acid
CCEWACNPXXXACTXGA

SEQ ID NO: 14125 - protein, 17 aa, Artificial Sequence
  Synthetically generated peptide
  VARIANT (1)..(17): Xaa = Any Amino Acid
CCEWACNPXXXACTGXA

SEQ ID NO: 14126 - protein, 16 aa, Artificial Sequence
  Synthetically generated peptide
  VARIANT (1)..(16): Xaa = Any Amino Acid
CCEWACNPXXAXCTGA

SEQ ID NO: 14127 - protein, 17 aa, Artificial Sequence
  Synthetically generated peptide
  VARIANT (1)..(17): Xaa = Any Amino Acid
CCEWACNPXXAXXCTGA

SEQ ID NO: 14128 - protein, 17 aa, Artificial Sequence
  Synthetically generated peptide
  VARIANT (1)..(17): Xaa = Any Amino Acid
CCEWACNPXXAXCXTGA

SEQ ID NO: 14129 - protein, 17 aa, Artificial Sequence
  Synthetically generated peptide
  VARIANT (1)..(17): Xaa = Any Amino Acid
CCEWACNPXXAXCTXGA

SEQ ID NO: 14130 - protein, 17 aa, Artificial Sequence
  Synthetically generated peptide
  VARIANT (1)..(17): Xaa = Any Amino Acid
CCEWACNPXXAXCTGXA

SEQ ID NO: 14131 - protein, 16 aa, Artificial Sequence
  Synthetically generated peptide
  VARIANT (1)..(16): Xaa = Any Amino Acid
CCEWACNPXXACXTGA

SEQ ID NO: 14132 - protein, 17 aa, Artificial Sequence
  Synthetically generated peptide
  VARIANT (1)..(17): Xaa = Any Amino Acid
CCEWACNPXXACXXTGA

SEQ ID NO: 14133 - protein, 17 aa, Artificial Sequence
  Synthetically generated peptide
  VARIANT (1)..(17): Xaa = Any Amino Acid
CCEWACNPXXACXTXGA

SEQ ID NO: 14134 - protein, 17 aa, Artificial Sequence
  Synthetically generated peptide
  VARIANT (1)..(17): Xaa = Any Amino Acid
CCEWACNPXXACXTGXA

SEQ ID NO: 14135 - protein, 16 aa, Artificial Sequence
  Synthetically generated peptide
  VARIANT (1)..(16): Xaa = Any Amino Acid
CCEWACNPXXACTXGA

SEQ ID NO: 14136 - protein, 17 aa, Artificial Sequence
  Synthetically generated peptide
  VARIANT (1)..(17): Xaa = Any Amino Acid
CCEWACNPXXACTXXGA

SEQ ID NO: 14137 - protein, 17 aa, Artificial Sequence
  Synthetically generated peptide
  VARIANT (1)..(17): Xaa = Any Amino Acid
CCEWACNPXXACTXGXA

SEQ ID NO: 14138 - protein, 16 aa, Artificial Sequence
  Synthetically generated peptide
  VARIANT (1)..(16): Xaa = Any Amino Acid
CCEWACNPXXACTGXA

SEQ ID NO: 14139 - protein, 17 aa, Artificial Sequence
  Synthetically generated peptide
  VARIANT (1)..(17): Xaa = Any Amino Acid
CCEWACNPXXACTGXXA

SEQ ID NO: 14140 - protein, 15 aa, Artificial Sequence
  Synthetically generated peptide
  VARIANT (1)..(15): Xaa = Any Amino Acid
CCEWACNPXAXCTGA

SEQ ID NO: 14141 - protein, 16 aa, Artificial Sequence
  Synthetically generated peptide
  VARIANT (1)..(16): Xaa = Any Amino Acid
CCEWACNPXAXXCTGA

SEQ ID NO: 14142 - protein, 17 aa, Artificial Sequence
  Synthetically generated peptide
  VARIANT (1)..(17): Xaa = Any Amino Acid
CCEWACNPXAXXXCTGA

SEQ ID NO: 14143 - protein, 17 aa, Artificial Sequence
  Synthetically generated peptide
  VARIANT (1)..(17): Xaa = Any Amino Acid
CCEWACNPXAXXCXTGA

SEQ ID NO: 14144 - protein, 17 aa, Artificial Sequence
  Synthetically generated peptide
  VARIANT (1)..(17): Xaa = Any Amino Acid
CCEWACNPXAXXCTXGA

SEQ ID NO: 14145 - protein, 17 aa, Artificial Sequence
  Synthetically generated peptide
  VARIANT (1)..(17): Xaa = Any Amino Acid
CCEWACNPXAXXCTGXA

SEQ ID NO: 14146 - protein, 16 aa, Artificial Sequence
  Synthetically generated peptide
  VARIANT (1)..(16): Xaa = Any Amino Acid
CCEWACNPXAXCXTGA

SEQ ID NO: 14147 - protein, 17 aa, Artificial Sequence
  Synthetically generated peptide
  VARIANT (1)..(17): Xaa = Any Amino Acid
CCEWACNPXAXCXXTGA

SEQ ID NO: 14148 - protein, 17 aa, Artificial Sequence
  Synthetically generated peptide
  VARIANT (1)..(17): Xaa = Any Amino Acid
CCEWACNPXAXCXTXGA

SEQ ID NO: 14149 - protein, 17 aa, Artificial Sequence
  Synthetically generated peptide
  VARIANT (1)..(17): Xaa = Any Amino Acid
CCEWACNPXAXCXTGXA

SEQ ID NO: 14150 - protein, 16 aa, Artificial Sequence
  Synthetically generated peptide
  VARIANT (1)..(16): Xaa = Any Amino Acid
CCEWACNPXAXCTXGA

SEQ ID NO: 14151 - protein, 17 aa, Artificial Sequence
  Synthetically generated peptide
  VARIANT (1)..(17): Xaa = Any Amino Acid
CCEWACNPXAXCTXXGA

SEQ ID NO: 14152 - protein, 17 aa, Artificial Sequence
  Synthetically generated peptide
  VARIANT (1)..(17): Xaa = Any Amino Acid
CCEWACNPXAXCTXGXA

SEQ ID NO: 14153 - protein, 16 aa, Artificial Sequence
  Synthetically generated peptide
  VARIANT (1)..(16): Xaa = Any Amino Acid
CCEWACNPXAXCTGXA

SEQ ID NO: 14154 - protein, 17 aa, Artificial Sequence
  Synthetically generated peptide
  VARIANT (1)..(17): Xaa = Any Amino Acid
CCEWACNPXAXCTGXXA

SEQ ID NO: 14155 - protein, 15 aa, Artificial Sequence
  Synthetically generated peptide
  VARIANT (1)..(15): Xaa = Any Amino Acid
CCEWACNPXACXTGA

SEQ ID NO: 14156 - protein, 16 aa, Artificial Sequence
  Synthetically generated peptide
  VARIANT (1)..(16): Xaa = Any Amino Acid
CCEWACNPXACXXTGA

SEQ ID NO: 14157 - protein, 17 aa, Artificial Sequence
  Synthetically generated peptide
  VARIANT (1)..(17): Xaa = Any Amino Acid
CCEWACNPXACXXXTGA

SEQ ID NO: 14158 - protein, 17 aa, Artificial Sequence
  Synthetically generated peptide
  VARIANT (1)..(17): Xaa = Any Amino Acid
CCEWACNPXACXXTXGA

SEQ ID NO: 14159 - protein, 17 aa, Artificial Sequence
  Synthetically generated peptide
  VARIANT (1)..(17): Xaa = Any Amino Acid
CCEWACNPXACXXTGXA

SEQ ID NO: 14160 - protein, 16 aa, Artificial Sequence
  Synthetically generated peptide
  VARIANT (1)..(16): Xaa = Any Amino Acid
CCEWACNPXACXTXGA

SEQ ID NO: 14161 - protein, 17 aa, Artificial Sequence
  Synthetically generated peptide
  VARIANT (1)..(17): Xaa = Any Amino Acid
CCEWACNPXACXTXXGA

SEQ ID NO: 14162 - protein, 17 aa, Artificial Sequence
  Synthetically generated peptide
  VARIANT (1)..(17): Xaa = Any Amino Acid
CCEWACNPXACXTXGXA

SEQ ID NO: 14163 - protein, 16 aa, Artificial Sequence
  Synthetically generated peptide
  VARIANT (1)..(16): Xaa = Any Amino Acid
CCEWACNPXACXTGXA

SEQ ID NO: 14164 - protein, 17 aa, Artificial Sequence
  Synthetically generated peptide
  VARIANT (1)..(17): Xaa = Any Amino Acid
CCEWACNPXACXTGXXA

SEQ ID NO: 14165 - protein, 15 aa, Artificial Sequence
  Synthetically generated peptide
  VARIANT (1)..(15): Xaa = Any Amino Acid
CCEWACNPXACTXGA

SEQ ID NO: 14166 - protein, 16 aa, Artificial Sequence
  Synthetically generated peptide
  VARIANT (1)..(16): Xaa = Any Amino Acid
CCEWACNPXACTXXGA

SEQ ID NO: 14167 - protein, 17 aa, Artificial Sequence
  Synthetically generated peptide
  VARIANT (1)..(17): Xaa = Any Amino Acid
CCEWACNPXACTXXXGA

SEQ ID NO: 14168 - protein, 17 aa, Artificial Sequence
  Synthetically generated peptide
  VARIANT (1)..(17): Xaa = Any Amino Acid
CCEWACNPXACTXXGXA

SEQ ID NO: 14169 - protein, 16 aa, Artificial Sequence
  Synthetically generated peptide
  VARIANT (1)..(16): Xaa = Any Amino Acid
CCEWACNPXACTXGXA

SEQ ID NO: 14170 - protein, 17 aa, Artificial Sequence
  Synthetically generated peptide
  VARIANT (1)..(17): Xaa = Any Amino Acid
CCEWACNPXACTXGXXA

SEQ ID NO: 14171 - protein, 15 aa, Artificial Sequence
  Synthetically generated peptide
  VARIANT (1)..(15): Xaa = Any Amino Acid
CCEWACNPXACTGXA

SEQ ID NO: 14172 - protein, 16 aa, Artificial Sequence
  Synthetically generated peptide
  VARIANT (1)..(16): Xaa = Any Amino Acid
CCEWACNPXACTGXXA

SEQ ID NO: 14173 - protein, 17 aa, Artificial Sequence
  Synthetically generated peptide
  VARIANT (1)..(17): Xaa = Any Amino Acid
CCEWACNPXACTGXXXA

SEQ ID NO: 14174 - protein, 14 aa, Artificial Sequence
  Synthetically generated peptide
  VARIANT (1)..(14): Xaa = Any Amino Acid
CCEWACNPAXCTGA

SEQ ID NO: 14175 - protein, 15 aa, Artificial Sequence
  Synthetically generated peptide
  VARIANT (1)..(15): Xaa = Any Amino Acid
CCEWACNPAXXCTGA

SEQ ID NO: 14176 - protein, 16 aa, Artificial Sequence
  Synthetically generated peptide
  VARIANT (1)..(16): Xaa = Any Amino Acid
CCEWACNPAXXXCTGA

SEQ ID NO: 14177 - protein, 17 aa, Artificial Sequence
  Synthetically generated peptide
  VARIANT (1)..(17): Xaa = Any Amino Acid
CCEWACNPAXXXXCTGA

SEQ ID NO: 14178 - protein, 17 aa, Artificial Sequence
  Synthetically generated peptide
  VARIANT (1)..(17): Xaa = Any Amino Acid
CCEWACNPAXXXCXTGA

SEQ ID NO: 14179 - protein, 17 aa, Artificial Sequence
  Synthetically generated peptide
  VARIANT (1)..(17): Xaa = Any Amino Acid
CCEWACNPAXXXCTXGA

SEQ ID NO: 14180 - protein, 17 aa, Artificial Sequence
  Synthetically generated peptide
  VARIANT (1)..(17): Xaa = Any Amino Acid
CCEWACNPAXXXCTGXA

SEQ ID NO: 14181 - protein, 16 aa, Artificial Sequence
  Synthetically generated peptide
  VARIANT (1)..(16): Xaa = Any Amino Acid
CCEWACNPAXXCXTGA

SEQ ID NO: 14182 - protein, 17 aa, Artificial Sequence
  Synthetically generated peptide
  VARIANT (1)..(17): Xaa = Any Amino Acid
CCEWACNPAXXCXXTGA

SEQ ID NO: 14183 - protein, 17 aa, Artificial Sequence
  Synthetically generated peptide
  VARIANT (1)..(17): Xaa = Any Amino Acid
CCEWACNPAXXCXTXGA

SEQ ID NO: 14184 - protein, 17 aa, Artificial Sequence
  Synthetically generated peptide
  VARIANT (1)..(17): Xaa = Any Amino Acid
CCEWACNPAXXCXTGXA

SEQ ID NO: 14185 - protein, 16 aa, Artificial Sequence
  Synthetically generated peptide
  VARIANT (1)..(16): Xaa = Any Amino Acid
CCEWACNPAXXCTXGA

SEQ ID NO: 14186 - protein, 17 aa, Artificial Sequence
  Synthetically generated peptide
  VARIANT (1)..(17): Xaa = Any Amino Acid
CCEWACNPAXXCTXXGA

SEQ ID NO: 14187 - protein, 17 aa, Artificial Sequence
  Synthetically generated peptide
  VARIANT (1)..(17): Xaa = Any Amino Acid
CCEWACNPAXXCTXGXA

SEQ ID NO: 14188 - protein, 16 aa, Artificial Sequence
  Synthetically generated peptide
  VARIANT (1)..(16): Xaa = Any Amino Acid
CCEWACNPAXXCTGXA

SEQ ID NO: 14189 - protein, 17 aa, Artificial Sequence
  Synthetically generated peptide
  VARIANT (1)..(17): Xaa = Any Amino Acid
CCEWACNPAXXCTGXXA

SEQ ID NO: 14190 - protein, 15 aa, Artificial Sequence
  Synthetically generated peptide
  VARIANT (1)..(15): Xaa = Any Amino Acid
CCEWACNPAXCXTGA

SEQ ID NO: 14191 - protein, 16 aa, Artificial Sequence
  Synthetically generated peptide
  VARIANT (1)..(16): Xaa = Any Amino Acid
CCEWACNPAXCXXTGA

SEQ ID NO: 14192 - protein, 17 aa, Artificial Sequence
  Synthetically generated peptide
  VARIANT (1)..(17): Xaa = Any Amino Acid
CCEWACNPAXCXXXTGA

SEQ ID NO: 14193 - protein, 17 aa, Artificial Sequence
  Synthetically generated peptide
  VARIANT (1)..(17): Xaa = Any Amino Acid
CCEWACNPAXCXXTXGA

SEQ ID NO: 14194 - protein, 17 aa, Artificial Sequence
  Synthetically generated peptide
  VARIANT (1)..(17): Xaa = Any Amino Acid
CCEWACNPAXCXXTGXA

SEQ ID NO: 14195 - protein, 16 aa, Artificial Sequence
  Synthetically generated peptide
  VARIANT (1)..(16): Xaa = Any Amino Acid
CCEWACNPAXCXTXGA

SEQ ID NO: 14196 - protein, 17 aa, Artificial Sequence
  Synthetically generated peptide
  VARIANT (1)..(17): Xaa = Any Amino Acid
CCEWACNPAXCXTXXGA

SEQ ID NO: 14197 - protein, 17 aa, Artificial Sequence
  Synthetically generated peptide
  VARIANT (1)..(17): Xaa = Any Amino Acid
CCEWACNPAXCXTXGXA

SEQ ID NO: 14198 - protein, 16 aa, Artificial Sequence
  Synthetically generated peptide
  VARIANT (1)..(16): Xaa = Any Amino Acid
CCEWACNPAXCXTGXA

SEQ ID NO: 14199 - protein, 17 aa, Artificial Sequence
  Synthetically generated peptide
  VARIANT (1)..(17): Xaa = Any Amino Acid
CCEWACNPAXCXTGXXA

SEQ ID NO: 14200 - protein, 15 aa, Artificial Sequence
  Synthetically generated peptide
  VARIANT (1)..(15): Xaa = Any Amino Acid
CCEWACNPAXCTXGA

SEQ ID NO: 14201 - protein, 16 aa, Artificial Sequence
  Synthetically generated peptide
  VARIANT (1)..(16): Xaa = Any Amino Acid
CCEWACNPAXCTXXGA

SEQ ID NO: 14202 - protein, 17 aa, Artificial Sequence
  Synthetically generated peptide
  VARIANT (1)..(17): Xaa = Any Amino Acid
CCEWACNPAXCTXXXGA

SEQ ID NO: 14203 - protein, 17 aa, Artificial Sequence
  Synthetically generated peptide
  VARIANT (1)..(17): Xaa = Any Amino Acid
CCEWACNPAXCTXXGXA

SEQ ID NO: 14204 - protein, 16 aa, Artificial Sequence
  Synthetically generated peptide
  VARIANT (1)..(16): Xaa = Any Amino Acid
CCEWACNPAXCTXGXA

SEQ ID NO: 14205 - protein, 17 aa, Artificial Sequence
  Synthetically generated peptide
  VARIANT (1)..(17): Xaa = Any Amino Acid
CCEWACNPAXCTXGXXA

SEQ ID NO: 14206 - protein, 15 aa, Artificial Sequence
  Synthetically generated peptide
  VARIANT (1)..(15): Xaa = Any Amino Acid
CCEWACNPAXCTGXA

SEQ ID NO: 14207 - protein, 16 aa, Artificial Sequence
  Synthetically generated peptide
  VARIANT (1)..(16): Xaa = Any Amino Acid
CCEWACNPAXCTGXXA

SEQ ID NO: 14208 - protein, 17 aa, Artificial Sequence
  Synthetically generated peptide
  VARIANT (1)..(17): Xaa = Any Amino Acid
CCEWACNPAXCTGXXXA

SEQ ID NO: 14209 - protein, 14 aa, Artificial Sequence
  Synthetically generated peptide
  VARIANT (1)..(14): Xaa = Any Amino Acid
CCEWACNPACXTGA

SEQ ID NO: 14210 - protein, 15 aa, Artificial Sequence
  Synthetically generated peptide
  VARIANT (1)..(15): Xaa = Any Amino Acid
CCEWACNPACXXTGA

SEQ ID NO: 14211 - protein, 16 aa, Artificial Sequence
  Synthetically generated peptide
  VARIANT (1)..(16): Xaa = Any Amino Acid
CCEWACNPACXXXTGA

SEQ ID NO: 14212 - protein, 17 aa, Artificial Sequence
  Synthetically generated peptide
  VARIANT (1)..(17): Xaa = Any Amino Acid
CCEWACNPACXXXXTGA

SEQ ID NO: 14213 - protein, 17 aa, Artificial Sequence
  Synthetically generated peptide
  VARIANT (1)..(17): Xaa = Any Amino Acid
CCEWACNPACXXXTXGA

SEQ ID NO: 14214 - protein, 17 aa, Artificial Sequence
  Synthetically generated peptide
  VARIANT (1)..(17): Xaa = Any Amino Acid
CCEWACNPACXXXTGXA

SEQ ID NO: 14215 - protein, 16 aa, Artificial Sequence
  Synthetically generated peptide
  VARIANT (1)..(16): Xaa = Any Amino Acid
CCEWACNPACXXTXGA

SEQ ID NO: 14216 - protein, 17 aa, Artificial Sequence
  Synthetically generated peptide
  VARIANT (1)..(17): Xaa = Any Amino Acid
CCEWACNPACXXTXXGA

SEQ ID NO: 14217 - protein, 17 aa, Artificial Sequence
  Synthetically generated peptide
  VARIANT (1)..(17): Xaa = Any Amino Acid
CCEWACNPACXXTXGXA

SEQ ID NO: 14218 - protein, 16 aa, Artificial Sequence
  Synthetically generated peptide
  VARIANT (1)..(16): Xaa = Any Amino Acid
CCEWACNPACXXTGXA

SEQ ID NO: 14219 - protein, 17 aa, Artificial Sequence
  Synthetically generated peptide
  VARIANT (1)..(17): Xaa = Any Amino Acid
CCEWACNPACXXTGXXA

SEQ ID NO: 14220 - protein, 15 aa, Artificial Sequence
  Synthetically generated peptide
  VARIANT (1)..(15): Xaa = Any Amino Acid
CCEWACNPACXTXGA

SEQ ID NO: 14221 - protein, 16 aa, Artificial Sequence
  Synthetically generated peptide
  VARIANT (1)..(16): Xaa = Any Amino Acid
CCEWACNPACXTXXGA

SEQ ID NO: 14222 - protein, 17 aa, Artificial Sequence
  Synthetically generated peptide
  VARIANT (1)..(17): Xaa = Any Amino Acid
CCEWACNPACXTXXXGA

SEQ ID NO: 14223 - protein, 17 aa, Artificial Sequence
  Synthetically generated peptide
  VARIANT (1)..(17): Xaa = Any Amino Acid
CCEWACNPACXTXXGXA

SEQ ID NO: 14224 - protein, 16 aa, Artificial Sequence
  Synthetically generated peptide
  VARIANT (1)..(16): Xaa = Any Amino Acid
CCEWACNPACXTXGXA

SEQ ID NO: 14225 - protein, 17 aa, Artificial Sequence
  Synthetically generated peptide
  VARIANT (1)..(17): Xaa = Any Amino Acid
CCEWACNPACXTXGXXA

SEQ ID NO: 14226 - protein, 15 aa, Artificial Sequence
  Synthetically generated peptide
  VARIANT (1)..(15): Xaa = Any Amino Acid
CCEWACNPACXTGXA

SEQ ID NO: 14227 - protein, 16 aa, Artificial Sequence
  Synthetically generated peptide
  VARIANT (1)..(16): Xaa = Any Amino Acid
CCEWACNPACXTGXXA

SEQ ID NO: 14228 - protein, 17 aa, Artificial Sequence
  Synthetically generated peptide
  VARIANT (1)..(17): Xaa = Any Amino Acid
CCEWACNPACXTGXXXA

SEQ ID NO: 14229 - protein, 14 aa, Artificial Sequence
  Synthetically generated peptide
  VARIANT (1)..(14): Xaa = Any Amino Acid
CCEWACNPACTXGA

SEQ ID NO: 14230 - protein, 15 aa, Artificial Sequence
  Synthetically generated peptide
  VARIANT (1)..(15): Xaa = Any Amino Acid
CCEWACNPACTXXGA

SEQ ID NO: 14231 - protein, 16 aa, Artificial Sequence
  Synthetically generated peptide
  VARIANT (1)..(16): Xaa = Any Amino Acid
CCEWACNPACTXXXGA

SEQ ID NO: 14232 - protein, 17 aa, Artificial Sequence
  Synthetically generated peptide
  VARIANT (1)..(17): Xaa = Any Amino Acid
CCEWACNPACTXXXXGA

SEQ ID NO: 14233 - protein, 17 aa, Artificial Sequence
  Synthetically generated peptide
  VARIANT (1)..(17): Xaa = Any Amino Acid
CCEWACNPACTXXXGXA

SEQ ID NO: 14234 - protein, 16 aa, Artificial Sequence
  Synthetically generated peptide
  VARIANT (1)..(16): Xaa = Any Amino Acid
CCEWACNPACTXXGXA

SEQ ID NO: 14235 - protein, 17 aa, Artificial Sequence
  Synthetically generated peptide
  VARIANT (1)..(17): Xaa = Any Amino Acid
CCEWACNPACTXXGXXA

SEQ ID NO: 14236 - protein, 15 aa, Artificial Sequence
  Synthetically generated peptide
  VARIANT (1)..(15): Xaa = Any Amino Acid
CCEWACNPACTXGXA

SEQ ID NO: 14237 - protein, 16 aa, Artificial Sequence
  Synthetically generated peptide
  VARIANT (1)..(16): Xaa = Any Amino Acid
CCEWACNPACTXGXXA

SEQ ID NO: 14238 - protein, 17 aa, Artificial Sequence
  Synthetically generated peptide
  VARIANT (1)..(17): Xaa = Any Amino Acid
CCEWACNPACTXGXXXA

SEQ ID NO: 14239 - protein, 14 aa, Artificial Sequence
  Synthetically generated peptide
  VARIANT (1)..(14): Xaa = Any Amino Acid
CCEWACNPACTGXA

SEQ ID NO: 14240 - protein, 15 aa, Artificial Sequence
  Synthetically generated peptide
  VARIANT (1)..(15): Xaa = Any Amino Acid
CCEWACNPACTGXXA

SEQ ID NO: 14241 - protein, 16 aa, Artificial Sequence
  Synthetically generated peptide
  VARIANT (1)..(16): Xaa = Any Amino Acid
CCEWACNPACTGXXXA

SEQ ID NO: 14242 - protein, 17 aa, Artificial Sequence
  Synthetically generated peptide
  VARIANT (1)..(17): Xaa = Any Amino Acid
CCEWACNPACTGXXXXA

SEQ ID NO: 14243 - protein, 12 aa, Artificial Sequence
  Synthetically generated peptide
CELCINVACTGC

SEQ ID NO: 14244 - protein, 12 aa, Artificial Sequence
  Synthetically generated peptide
CELCVNVACTGC

SEQ ID NO: 14245 - protein, 10 aa, Artificial Sequence
  Synthetically generated peptide
CAELCCNPAC

SEQ ID NO: 14246 - protein, 13 aa, Artificial Sequence
  Synthetically generated peptide
CCGLCCNPACAGC

SEQ ID NO: 14247 - protein, 13 aa, Artificial Sequence
  Synthetically generated peptide
CCGLCCYPACAGC

SEQ ID NO: 14248 - protein, 12 aa, Artificial Sequence
  Synthetically generated peptide
CELCCNPACAGC

SEQ ID NO: 14249 - protein, 13 aa, Artificial Sequence
  Synthetically generated peptide
CCDVCCYPACTGC

SEQ ID NO: 14250 - protein, 13 aa, Artificial Sequence
  Synthetically generated peptide
CCELCCNPACAGC

SEQ ID NO: 14251 - protein, 13 aa, Artificial Sequence
  Synthetically generated peptide
CCELCCYPACAGC

SEQ ID NO: 14252 - protein, 13 aa, Artificial Sequence
  Synthetically generated peptide
CCELCCNPACTGC

SEQ ID NO: 14253 - protein, 13 aa, Artificial Sequence
  Synthetically generated peptide
CCELCCYPACTGC

SEQ ID NO: 14254 - protein, 13 aa, Artificial Sequence
  Synthetically generated peptide
CCELCCNPGCTGC

SEQ ID NO: 14255 - protein, 13 aa, Artificial Sequence
  Synthetically generated peptide
CCEACCNPACTGC

SEQ ID NO: 14256 - protein, 13 aa, Artificial Sequence
  Synthetically generated peptide
CCEKCCNPACTGC

SEQ ID NO: 14257 - protein, 13 aa, Artificial Sequence
  Synthetically generated peptide
CCELCCNPACTAC

SEQ ID NO: 14258 - protein, 13 aa, Artificial Sequence
  Synthetically generated peptide
CCPLCCNPACTGC

SEQ ID NO: 14259 - protein, 13 aa, Artificial Sequence
  Synthetically generated peptide
ACELCANPACTGC

SEQ ID NO: 14260 - protein, 13 aa, Artificial Sequence
  Synthetically generated peptide
CCELACNPACTGA

SEQ ID NO: 14261 - protein, 12 aa, Artificial Sequence
  Synthetically generated peptide
CELCANPACTGC

SEQ ID NO: 14262 - protein, 10 aa, Artificial Sequence
  Synthetically generated peptide
CCELACNPAC

SEQ ID NO: 14263 - protein, 13 aa, Artificial Sequence
  Synthetically generated peptide
CCDVCCNPACAGC

SEQ ID NO: 14264 - protein, 13 aa, Artificial Sequence
  Synthetically generated peptide
CCDVCCNPACTGC

SEQ ID NO: 14265 - protein, 14 aa, Artificial Sequence
  Synthetically generated peptide
CCDVCCNPACAGCY

SEQ ID NO: 14266 - protein, 14 aa, Artificial Sequence
  Synthetically generated peptide
CCDVCCNPACTGCY

SEQ ID NO: 14267 - protein, 13 aa, Artificial Sequence
  Synthetically generated peptide
CCELCCYPACAGC

SEQ ID NO: 14268 - protein, 12 aa, Artificial Sequence
  Synthetically generated peptide
CCICCNPACFGC

SEQ ID NO: 14269 - protein, 11 aa, Artificial Sequence
  Synthetically generated peptide
CCNYCCSPCGC

SEQ ID NO: 14270 - protein, 13 aa, Artificial Sequence
  Synthetically generated peptide
  VARIANT (1)..(13): Xaa = Any Amino Acid
CCXXCCXPACXGC

SEQ ID NO: 14271 - protein, 13 aa, Artificial Sequence
  Synthetically generated peptide
  VARIANT (1)..(13): Xaa = Any Amino Acid
CCIXCCNPACFGC

SEQ ID NO: 14272 - protein, 13 aa, Artificial Sequence
  Synthetically generated peptide
  VARIANT (1)..(13): Xaa = Any Amino Acid
CCNYCCSPXCXGC

SEQ ID NO: 14273 - protein, 54 aa, Artificial Sequence
  Synthetically generated peptide
MKKSILFIFLSVLSFSPFAQDAKPAGSSKEKITLESKKCNIVKKSNKSGPESMN

SEQ ID NO: 14274 - protein, 14 aa, Artificial Sequence
  Synthetically generated peptide
  VARIANT (4)..(14): Xaa = Any Amino Acid
CCEXCCNPACTGCX

SEQ ID NO: 14275 - protein, 6 aa, Artificial Sequence
  Synthetically generated peptide
  VARIANT (4)..(6): Xaa = Arg or Lys
  VARIANT (5)..(5): Xaa = Trp or Ile
RYYXXX

SEQ ID NO: 14276 - protein, 6 aa, Artificial Sequence
  Synthetically generated peptide
KYYRWR

SEQ ID NO: 14277 - protein, 6 aa, Artificial Sequence
  Synthetically generated peptide
RYYRWR

SEQ ID NO: 14278 - protein, 6 aa, Artificial Sequence
  Synthetically generated peptide
KWRYYR

SEQ ID NO: 14279 - protein, 6 aa, Artificial Sequence
  Synthetically generated peptide
RYYRWK

SEQ ID NO: 14280 - protein, 6 aa, Artificial Sequence
  Synthetically generated peptide
RYYRIK

SEQ ID NO: 14281 - protein, 6 aa, Artificial Sequence
  Synthetically generated peptide
RYYRIR

SEQ ID NO: 14282 - protein, 6 aa, Artificial Sequence
  Synthetically generated peptide
RYYKIK

SEQ ID NO: 14283 - protein, 6 aa, Artificial Sequence
  Synthetically generated peptide
RYYKIR

SEQ ID NO: 14284 - protein, 6 aa, Artificial Sequence
  Synthetically generated peptide
RYYKWR

SEQ ID NO: 14285 - protein, 6 aa, Artificial Sequence
  Synthetically generated peptide
RYYKWK

SEQ ID NO: 14286 - protein, 6 aa, Artificial Sequence
  Synthetically generated peptide
RYYRWR

SEQ ID NO: 14287 - protein, 6 aa, Artificial Sequence
  Synthetically generated peptide
RYYRWK

SEQ ID NO: 14288 - protein, 6 aa, Artificial Sequence
  Synthetically generated peptide
RYYRIK

SEQ ID NO: 14289 - protein, 6 aa, Artificial Sequence
  Synthetically generated peptide
RYYKWR

SEQ ID NO: 14290 - protein, 6 aa, Artificial Sequence
  Synthetically generated peptide
RYYKWK

SEQ ID NO: 14291 - protein, 6 aa, Artificial Sequence
  Synthetically generated peptide
RYYRWK

SEQ ID NO: 14292 - protein, 6 aa, Artificial Sequence
  Synthetically generated peptide
KYYRWK

SEQ ID NO: 14293 - protein, 11 aa, Human immunodeficiency virus
YGRKKRRQRRR

SEQ ID NO: 14294 - protein, 11 aa, Human immunodeficiency virus
YARKARRQARR

SEQ ID NO: 14295 - protein, 11 aa, Human immunodeficiency virus
YARAAARQARA

SEQ ID NO: 14296 - protein, 11 aa, Human immunodeficiency virus
YARAARRAARR

SEQ ID NO: 14297 - protein, 11 aa, Human immunodeficiency virus
YARAARRAARA

SEQ ID NO: 14298 - protein, 10 aa, Human immunodeficiency virus
ARRRRRRRRR

SEQ ID NO: 14299 - protein, 11 aa, Human immunodeficiency virus
YAAARRRRRRR

SEQ ID NO: 14300 - protein, 4 aa, Artificial Sequence
  Synthetically generated peptide
FALA

SEQ ID NO: 14301 - protein, 5 aa, Artificial Sequence
  Synthetically generated peptide
VLALA

SEQ ID NO: 14302 - protein, 4 aa, Artificial Sequence
  Synthetically generated peptide
ALAL

SEQ ID NO: 14303 - protein, 5 aa, Artificial Sequence
  Synthetically generated peptide
ALALA

1. A purified polypeptide comprising the amino acid sequence:
X₁ Cys Glu X₂ X₃X₄ Asn Pro Ala Cys Thr Gly X₅ X₆
wherein:
X₁, X₃, X₄ and X₅ are independently selected from: Ala, Arg, Asn, Asp, Cys, Gln, Glu, Gly, His, Ile, Leu, Lys, Met, Phe, Pro, Ser, Thr, Trp, Tyr and Val;
X₂ is selected from: Ala, Arg, Asn, Asp, Cys, Gln, Glu, Gly, His, Ile, Leu, Lys, Met, Phe, Pro, Ser, Thr, Trp, Tyr and Val; and
X₆ is selected from Phe, Trp and Tyr or is missing,
provided that when both X₁ and X₄ are Ala and both X₃ and X₅ are Cys or when both X₃ and X₅ are Ala and both X₁ and X₄ are Cys or when X₁, X₃, X₄ and X₅ are all Cys, then either X₆ is selected from Phe and Trp or X₂ is not Leu.

2-37. (canceled)

38. A method for treating a disorder selected from the group consisting of: a gastrointestinal disorder, cystic fibrosis, congestive heart failure, benign prostatic hyperplasia, the method comprising administering a composition comprising the polypeptide claim 1.

39. A method for treating a disorder selected from the group consisting of: a gastrointestinal disorder, cystic fibrosis, congestive heart failure, benign prostatic hyperplasia, the method comprising administering a composition comprising the polypeptide of claim 1 without the proviso.

40-49. (canceled)

50. A purified protein comprising the amino acid sequence Cys Cys Glu Tyr Cys Cys Asn Pro Ala Cys Thr Gly Cys having at least one of the following substitutions and no other substitutions within the amino acid sequence Cys Cys Glu Tyr Cys Cys Asn Pro Ala Cys Thr Gly Cys:
(a) residue 3 of the sequence Cys Cys Glu Tyr Cys Cys Asn Pro Ala Cys Thr Gly Cys is substituted by an amino other than Glu;
(b) residue 4 of the sequence Cys Cys Glu Tyr Cys Cys Asn Pro Ala Cys Thr Gly Cys is substituted by an amino other than Tyr provided that the amino acid is not Leu, Ile, Val, Ala or Lys when residue 3 is Asp, Glu, Gln, or Gly;
(c) residue 7 of the sequence Cys Cys Glu Tyr Cys Cys Asn Pro Ala Cys Thr Gly Cys is substituted by an amino other than Asn;
(d) residue 8 of the sequence Cys Cys Glu Tyr Cys Cys Asn Pro Ala Cys Thr Gly Cys is substituted by an amino other than Pro;
(e) residue 9 of the sequence Cys Cys Glu Tyr Cys Cys Asn Pro Ala Cys Thr Gly Cys is substituted by an amino other than Ala;
(f) residue 11 of the sequence Cys Cys Glu Tyr Cys Cys Asn Pro Ala Cys Thr Gly Cys is substituted by an amino other than Thr; and
(g) residue 9 of the sequence Cys Cys Glu Tyr Cys Cys Asn Pro Ala Cys Thr Gly Cys is substituted by an amino other than Gly.

51-125. (canceled)
